(19) United States
(12) Patent Application Publication
(10) Pub. No.: US 2009/0325264 A1
(43) Pub. Date: Dec. 31, 2009

(54) Engineered Delta-15-Fatty Acid Desaturases

(76) Inventors: MICHAEL J. STOREK, WALTHAM, MA (US); HENRY E. VALENTIN, DAVIS, CA (US); STEVEN E. SCREEN, ST. LOUIS, MO (US); VIRGINIA URSIN, PAWCATUCK, CT (US); BYRON FROMAN, DAVIS, CA (US); KEVIN JARRELL, LINCOLN, MA (US); SARA A. SALVADOR, SUDBURY, MA (US); ROBERT MCCARROLL, LEXINGTON, MA (US); PRASHANTH VISHWANATH, ARLINGTON, MA (US)

Correspondence Address: MONSANTO COMPANY, 800 N. LINDBERGH BLVD., ATTENTION: GAIL P. WUELLNER, IP PARALEGAL, (E1NA), ST. LOUIS, MO, 63167, US

(21) Appl. No.: 12/428,820

(22) Filed: Apr. 23, 2009

Related U.S. Application Data
(60) Provisional application No. 61/048,248, filed on Apr. 28, 2008.

(51) Int. Cl. C12N 9/02; C07H 21/00; C12N 5/04; C12N 5/10

(52) U.S. Cl. 435/189; 536/23.2; 435/419; 435/416; 435/412; 435/415; 435/414

(57) ABSTRACT

The present invention provides engineered fatty acid desaturase molecules preferring Gamma Linolenic Acid (GLA) over Linoleic Acid (LA) as a substrate. The invention further discloses compositions, polynucleotide constructs, transformed host cells, transgenic plants and seeds comprising the desaturase molecule, and methods for preparing and using the same. In particular, the disclosed engineered desaturase molecules are capable of altering the omega-3 fatty acid profiles in plants and plant parts.

[0001] This application claims benefit under 35USC§ 119(e) of U.S. provisional application Ser. No. 61/048,248 filed Apr. 28, 2008, herein incorporated by reference in its entirety.

### INCORPORATION OF SEQUENCE LISTING

[0002] A sequence listing containing the file named pa_{—}01220.txt, which is 2,296,089 bytes (as measured in Microsoft Windows®) and created on Apr. 23, 2009, comprises 902 polynucleotide and protein sequences, and is herein incorporated by reference in its entirety.

### FIELD OF THE INVENTION

[0003] The invention relates generally to desaturase enzymes that modulate the number and location of double bonds in long chain polyunsaturated fatty acids (LC-PUFAs), methods of use thereof, methods of generating such molecules, and compositions derived therefrom. In particular, the invention relates to engineered delta-15 desaturase enzymes that exhibit improved properties, and nucleic acids encoding for such enzymes.

### BACKGROUND

[0004] The primary products of fatty acid biosynthesis in most organisms are 16- and 18-carbon compounds. The relative ratio of chain lengths and degree of unsaturation of these fatty acids vary widely among species. Mammals, for example, produce primarily saturated and monosaturated fatty acids, while most higher plants produce fatty acids with one, two, or three double bonds, the latter two comprising polyunsaturated fatty acids (PUFAs).

[0005] Two main families of PUFAs are the omega-3 fatty acids (also represented as “n-3” fatty acids), exemplified by eicosapentaenoic acid (EPA, 20:4, n-3), and the omega-6 fatty acids (also represented as “n-6” fatty acids), exemplified by arachidonic acid (ARA, 20:4, n-6). PUFAs are important components of the plasma membrane of the cell and adipose tissue, where they may be found in such forms as phospholipids and as triglycerides, respectively. PUFAs are necessary for proper development in mammals, particularly in the developing infant brain, and for tissue formation and repair.

[0006] Several disorders respond to treatment with fatty acids. Supplementation with PUFAs has been shown to reduce the rate of restenosis after angioplasty (see, e.g., Bairati et al. 1992). The health benefits of certain dietary omega-3 fatty acids for cardiovascular disease and rheumatoid arthritis also have been well documented (see, e.g., Simopoulos, 1997; Cleland and James, 2000). Administration of stearidonic acid (SDA), an omega-3 fatty acid, has been shown to inhibit biosynthesis of leukotrienes (U.S. Pat. No. 5,158,975, herein incorporated by reference in its entirety). The consumption of SDA has been shown to lead to a decrease in blood levels of proinflammatory cytokines TNF-α and IL-1β (WO/03075670, herein incorporated by reference in its entirety).

[0007] Dietary consumption of long chain omega-3 fatty acids have been shown to impart health benefits. With this base of evidence, health authorities and nutritionists in Canada (Scientific Review Committee, 1990, Nutrition Recommendations, Minister of National Health and Welfare, Canada, Ottowa), Europe (de Deckerer et al., 1998), the United Kingdom (The British Nutrition Foundation, 1992, Unsaturated fatty-acids—nutritional and physiological significance: The report of the British Nutrition Foundation's Task Force, Chapman and Hall, London), and the United States (Simopoulos et al., 1999) have recommended increased dietary consumption of these PUFAs.

[0008] PUFAs, such as linoleic acid (LA, 18:2, Δ9, 12) and α-linolenic acid (ALA, 18:3, Δ9, 12, 15), are regarded as essential fatty acids in the diet because mammals lack the ability to synthesize these acids. LA is produced from oleic acid (OA, 18:1, Δ9) by a Δ12-desaturase while ALA is produced from LA by a Δ15-desaturase. When ingested, mammals have the ability to metabolize LA and ALA to form the n-6 and n-3 families of long LC-PUFAs. These LC-PUFAs are important cellular components conferring fluidity to membranes and functioning as precursors of biologically active eicosanoids such as prostaglandins, prostacyclins, and leukotrienes, which regulate normal physiological functions. ARA (20:4, n-6) is the principal precursor for the synthesis of eicosanoids, which include leukotrienes, prostaglandins, and thromboxanes, and which also play a role in the inflammation process.

[0009] However, mammals cannot synthesize essential PUFAs and can only obtain them in their diet. In mammals, the formation of certain LC-PUFAs is rate-limited by the step of Δ6 desaturation, which converts LA to GLA and ALA to SDA. Many physiological and pathological conditions have been shown to depress this metabolic step even further, and consequently, the production of LC-PUFAs. To overcome the rate-limiting step and increase tissue levels of EPA, one could consume large amounts of ALA. However, consumption of just moderate amounts of SDA provides an efficient source of EPA, as SDA is about four times more efficient than ALA at elevating tissue EPA levels in humans (U.S. Pat. No. 7,163,960, herein incorporated by reference in its entirety). In the same studies, SDA administration was also able to increase the tissue levels of docosapentaenoic acid (DPA), which is an elongation product of EPA. Alternatively, bypassing the Δ6-desaturation via dietary supplementation with EPA or Docosahexaenoic acid (DHA) can effectively alleviate many pathological diseases associated with low levels of PUFAs.

[0010] The need for a reliable and economical source of PUFAs has spurred interest in alternative sources of PUFAs. However, currently available sources of PUFAs are not desirable for a multitude of reasons. There are several disadvantages associated with commercial production of PUFAs from natural sources. Natural sources of PUFAs, such as animals and plants, have limited source supplies and tend to have highly heterogeneous oil compositions. The oils obtained from these sources can require extensive purification to separate out one or more desired PUFAs or to produce an oil that is enriched in one or more PUFAs.

[0011] Major long chain PUFAs of importance include DHA and EPA, which are primarily found in different types of fish oil, and ARA, found in filamentous fungi such as Mortierella. For DHA, a number of sources exist for commercial production including a variety of marine organisms, oils obtained from cold water marine fish, and egg yolk fractions. Commercial sources of SDA include the plant genera Trichodesma, Borago (borage) and Echium. Natural sources of PUFAs also are subject to uncontrollable fluctuations in availability. Fish stocks may undergo natural variation or may be depleted by overfishing. In addition, even with overwhelming evidence of their therapeutic benefits, dietary recommendations regarding omega-3 fatty acids are not heeded. Fish oils have unpleasant tastes and odors, which may be impossible to economically separate from the desired product, and can render such products unacceptable as food supplements. Animal oils, and particularly fish oils, can accumulate environmental pollutants. Foods may be enriched with fish oils, but again, such enrichment is problematic because of cost and declining fish stocks worldwide. This problem is also an impediment to consumption and intake of whole fish. Nonetheless, if the health messages to increase fish intake were embraced by communities, there would likely be a problem in meeting demand for fish. Furthermore, there are problems with sustainability of this industry, which relies heavily on wild fish stocks for aquaculture feed (Naylor et al., 2000). Large scale fermentation of organisms is expensive. Natural animal tissues contain low amounts of ARA and are difficult to process. Furthermore, the use of desaturase molecules derived from Caenorhabditis elegans (Meesapyodsuk et al., 2000) is not ideal for the commercial production of enriched plant seed oils.

[0012] Therefore, it would be advantageous to obtain or design genetic material involved in PUFA biosynthesis and to express the isolated material in a plant system, in particular, a land-based terrestrial crop plant system, that can be manipulated to provide production of commercial quantities of one or more PUFAs. There is also a need to increase omega-3 fat intake in humans and animals. Thus there is a need to provide a wide range of omega-3 enriched foods and food supplements so that subjects can choose feed, feed ingredients, food and food ingredients that suit their usual dietary habits. Currently there is only one omega-3 fatty acid, ALA, available in vegetable oils. However, there is poor conversion of ingested ALA to the longer-chain omega-3 fatty acids such as EPA and DHA. It has been demonstrated in U.S. Pat. No. 7,163,960 (herein incorporated by reference in its entirety) for “Treatment And Prevention Of Inflammatory Disorders,” that elevating ALA intake from the community average of 1/g day to 14 g/day by use of flaxseed oil only modestly increased plasma phospholipid EPA levels. A 14-fold increase in ALA intake resulted in a 2-fold increase in plasma phospholipid EPA (Mantzioris et al., 1994).

[0013] Based on studies, it is seen that in commercial oilseed crops, such as canola, soybean, corn, sunflower, safflower, or flax, the conversion of some fraction of the mono- and polyunsaturated fatty acids that typify their seed oil to SDA requires the seed-specific expression of multiple desaturase enzymes, including Δ6- and Δ12, and an enzyme that has Δ15-desaturase activity. Oils derived from plants expressing elevated levels of Δ6, Δ12, and Δ15-desaturases are rich in SDA and other omega-3 fatty acids. Such oils can be utilized to produce foods and food supplements enriched in omega-3 fatty acids and consumption of such foods effectively increases tissue levels of EPA and DHA. Foods and food stuffs, such as milk, margarine and sausages, made or prepared with omega-3 enriched oils will result in therapeutic benefits. Thus, novel nucleic acids of Δ15-desaturases for use in transgenic crop plants would be desirable, to produce oils enriched in PUFAs. New plant seed oils enriched for PUFAs and, particular, omega-3 fatty acids such as stearodonic acid, would be similarly useful.

[0014] To that end, an efficient and commercially viable production of PUFAs using fatty acid desaturases, genes encoding them, and recombinant methods of producing them, would be highly desirable. Additionally useful would be oils containing higher relative proportions of and/or enriched in specific PUFAs and food compositions and supplements containing them, as well as for reliable economical methods of producing specific PUFAs.

### SUMMARY OF THE INVENTION

[0015] In one aspect, the invention provides engineered molecules that desaturate a fatty acid molecule at carbon 15 (Δ15-desaturase), and polynucleotides encoding such molecules. These may be used to transform cells or modify the fatty acid composition of a plant or the oil produced by a plant. One embodiment of the invention is an engineered Δ15-desaturase molecule that exhibits a high conversion rate of GLA to SDA and a substrate preference for GLA over LA. Another embodiment is a polynucleotide molecule encoding such a desaturase molecule. Yet another embodiment is a construct, plant cell, transgenic plant, progeny of said plant or seed of said plant comprising said engineered desaturase molecule. A further embodiment is a method of producing or using said engineered desaturase molecule.

[0016] The present invention provides a desaturase molecule that exhibits a substrate preference for GLA over LA, as evidenced by the SDA/ALA ratio, of at least 1.6×, at least 1.65×, at least 1.7×, at least 1.75×, 1.8×, 1.9×, 2.0× or even greater such as at least 2.5×, at least 5.0× or at least 7.5×.

[0017] In other embodiments, the present invention provides a desaturase molecule that exhibits a total conversion rate of GLA to SDA of at least 40%, at least 41%, at least 42%, at least 43%, at least 44%, at least 45%, at least 46%, at least 47%, or even greater such as at least 50%, at least 55% or at least 60%.

[0018] Another aspect of the present invention is a desaturase molecule, that when expressed in a transgenic plant, causes the transgenic plant to produce more omega-3 fatty acid compared to that of a non-transgenic plant. Another aspect of the present invention is a desaturase molecule, that when expressed in a transgenic plant, causes the transgenic plant to produce more delta-6 desaturated omega-3 fatty acid compared to that of a non-transgenic plant.

[0019] Additional aspects of the present invention include methods for generating engineered desaturase molecule polypeptides and polynucleotides disclosed herein. Such engineered molecules are generated from the identification and manipulation of phenotypically important regions identified from a parental desaturase molecules. Such regions may include, but are not limited to, primary sequence motifs and secondary structures such as alpha helices or beta strands. Included in the present invention are alterations in molecular structure in polypeptide motifs of a parental fungal desaturase.

[0020] In another aspect, the invention provides an isolated polypeptide comprising a sequence selected from the group consisting of SEQ ID NO: 1 through 331, and polynucleotides encoding the same. In another aspect, the invention provides an isolated polynucleotide comprising a sequence selected from the group consisting of SEQ ID NO: 332 through 662. Further aspects of the present invention include engineered desaturase molecules that are derived from a parental molecule, or a molecule exhibiting 75%, 80%, 85%, 90%, 95% or 99% similarity to a fungal desaturase.

[0021] In yet another aspect, the invention provides a recombinant vector comprising an isolated polynucleotide in accordance with the invention. In still yet another aspect, the invention provides cells, such as mammalian, plant, insect, yeast and bacterial cells transformed with the polynucleotides of the instant invention. In a further embodiment, the cells are transformed with recombinant vectors comprising constitutive or tissue-specific promoters in addition to the polynucleotides of the present invention. In certain embodiments of the invention, such cells may also be defined as transformed with a nucleic acid sequence encoding a polypeptide having desaturase activity that desaturates a fatty acid molecule at carbon 6.

[0022] Still yet another aspect of the invention provides a method of producing seed oil comprising omega-3 fatty acids from plant seeds, comprising the steps of (a) obtaining seeds of a plant according to the invention; and (b) extracting the oil from said seeds. Examples of such a plant seed include canola, soy, soybeans, rapeseed, sunflower, cotton, cocoa, peanut, safflower, coconut, flax, oil palm, oilseed Brassica napus, and corn. Preferred methods of transforming such plant cells include the use of Ti and Ri plasmids of Agrobacterium, electroporation, and high-velocity ballistic bombardment.

[0023] In an additional aspect, a method is provided of producing a plant comprising seed oil containing altered levels of omega-3 fatty acids comprising introducing a recombinant vector of the invention into an oil-producing plant. In the method, introducing the recombinant vector may comprise plant breeding and may comprise the steps of: (a) transforming a plant cell with the recombinant vector; and (b) regenerating said plant from the plant cell, wherein the plant has altered levels of omega-3 fatty acids. In the method, the plant may, for example, be selected from the group consisting of Arabidopsis thaliana, oilseed Brassica, rapeseed, sunflower, safflower, canola, corn, soybean, cotton, flax, jojoba, Chinese tallow tree, tobacco, cocoa, peanut, fruit plants, citrus plants, and plants producing nuts and berries. The plant may be also defined as transformed with a nucleic acid sequence encoding a polypeptide having desaturase activity that desaturates a fatty acid molecule at carbon 6 and the plant may have SDA increased. The method may also further comprise introducing the recombinant vector into a plurality of oil-producing plants and screening the plants or progeny thereof having inherited the recombinant vector for a plant having a desired profile of omega-3 fatty acids.

[0024] In yet another aspect, the invention provides an endogenous seed oil having a SDA content of from about 8% to about 50% and an oleic acid content of from about 40% to about 75%. In certain embodiments, the seed oil may be further defined as comprising less than 10% combined ALA, LA and GLA. The oil may also comprise a SDA content further defined as from about 10% to about 35%, including from about 12% to about 35%, and about 15% to about 35%. In further embodiments of the invention, the seed oil may have an oleic acid content further defined as from about 45% to about 65%, including from about 50% to about 65%, from about 50% to about 60% and from about 55% to about 65%. In still further embodiments of the invention, the SDA content is further defined as from about 12% to about 35% and the oleic acid content is further defined as from about 55% to about 65%.

[0025] In still yet another aspect, the invention provides a method of increasing the nutritional value of an edible product for human or animal consumption, comprising adding a seed oil provided by the invention to the edible product. In certain embodiments, the product is human and/or animal food. The edible product may also be animal feed and/or a food supplement. In the method, the seed oil may increase the SDA content of the edible product and/or may decrease the ratio of omega-6 to omega-3 fatty acids of the edible product. The edible product may lack SDA prior to adding the seed oil.

[0026] In still yet another aspect, the invention provides a method of manufacturing food or feed, comprising adding a seed oil provided by the present invention to starting food or feed ingredients to produce the food or feed. The invention also provides food or feed made by the method.

[0027] In still yet another aspect, the invention comprises a method of providing SDA to a human or animal, comprising administering the seed oil provided by the present invention to said human or animal. In the method, the seed oil may be administered in an edible composition, including food or feed. Examples of food include, but are not limited to, beverages, infused foods, sauces, condiments, salad dressings, fruit juices, syrups, desserts, icings and fillings, soft frozen products, confections or intermediate food. The edible composition may be substantially a liquid or solid. The edible composition may also be a food supplement and/or nutraceutical. In the method, the seed oil may be administered to a human and/or an animal. Examples of animals the oil may be administered to include livestock or poultry.

Certain aspects of the present invention are described in the following statements:
[0028] Statement 1: An engineered fatty acid desaturase molecule, wherein said desaturase molecule:
   [0029] a. exhibits a substrate preference for Gamma Linolenic Acid (GLA) over Linoleic Acid (LA) of at least 1.75× and as calculated by the formula (SDA/(SDA+GLA))/(ALA/(LA+ALA), where SDA is stearodonic acid, GLA is gamma linolenic acid, ALA is alpha linolenic acid, and LA is linoleic acid; or
   [0030] b. exhibits a total conversion rate of GLA to SDA of at least 40%; or
   [0031] c. when expressed in a transgenic plant, causes the transgenic plant to produce more omega-3 fatty acid than non-transgenic plants; or
   [0032] d. when co-expressed with a delta-6 fatty acid desaturase in a transgenic plant, causes the transgenic plant to accumulate, as compared to a non-transgenic plant, a condition selected from the group consisting of: more SDA than ALA, and greater conversion of GLA to SDA than LA to ALA.
[0033] Statement 2: The desaturase molecule of statement 1, further defined as a molecule that desaturates a fatty acid molecule at carbon 15.
[0034] Statement 3: The desaturase molecule of statement 1, wherein said molecule has 80% similarity to a fungal desaturase.
[0035] Statement 4: The desaturase molecule of statement 1, wherein said molecule comprises amino acid sequence variants generated from a parental fungal desaturase.
[0036] Statement 5: The desaturase molecule of statement 1, wherein said desaturase is identified from a genus selected from the group consisting of: Mortierella, Neurospora, Aspergillus, Saccharomyces, Botrytis, Chlorella.
[0037] Statement 6: The desaturase molecule of statement 1, wherein the molecule has a sequence selected from the group consisting of SEQ ID NO: 1 through SEQ ID NO: 331.
[0038] Statement 7: The desaturase molecule of statement 1, wherein the molecule exhibits a percent sequence identity of greater than about 90% identity with a molecule selected from the group consisting of: SEQ ID NO: 1 through SEQ ID NO: 331.
[0039] Statement 8: The desaturase molecule of statement 1, wherein the molecule comprises a fragment of SEQ ID NO: 1 through SEQ ID NO: 331.
[0040] Statement 9: A polynucleotide encoding the desaturase molecule of statement 1.
[0041] Statement 10: The polynucleotide of statement 9, wherein the polynucleotide has a sequence selected from the group consisting of SEQ ID NO: 332 through SEQ ID NO: 662.
[0042] Statement 11: The polynucleotide of statement 9 that, when under the control of a regulatory element, is capable of expression in a plant.
[0043] Statement 12: The polynucleotide of statement 9, or any complement thereof, or any fragment thereof, comprising a nucleic acid sequence that exhibits a substantial percent sequence identity of greater than about 90% to a sequence selected from the group consisting of SEQ ID NO: 332 through SEQ ID NO: 662.
[0044] Statement 13: A polynucleotide that hybridizes under stringent conditions with the polynucleotide of statement 9, or a complement thereof, or a fragment thereof.
[0045] Statement 14: A construct comprising the polynucleotide of statement 9.
[0046] Statement 15: The construct of statement 14, further comprising a second polynucleotide that is transcribable.
[0047] Statement 16: The construct of statement 15, wherein the second transcribable polynucleotide molecule is selected from the group consisting of: a non-coding regulatory element, a selectable marker, a gene encoding a second desaturase, and a gene of agronomic interest.
[0048] Statement 17: The construct of statement 16, wherein the gene of agronomic interest is a gene controlling the phenotype of a trait selected from the group consisting of: herbicide tolerance, insect control, modified yield, fungal disease resistance, virus resistance, nematode resistance, bacterial disease resistance, plant growth and development, starch production, modified oils production, high oil production, modified fatty acid content, high protein production, fruit ripening, enhanced animal and human nutrition, biopolymers, environmental stress resistance, pharmaceutical peptides and secretable peptides, improved processing traits, improved digestibility, enzyme production, flavor, nitrogen fixation, hybrid seed production, fiber production, and biofuel production.
[0049] Statement 18: A host cell stably transformed with the construct of statement 14.
[0050] Statement 19: The host cell of statement 17, further defined as a plant cell.
[0051] Statement 20: The host cell of statement 17, further defined as a fungal cell.
[0052] Statement 21: The host cell of statement 17, further defined as a bacterial cell.
[0053] Statement 22: A progeny of the host cell of statement 17, wherein said progeny has inherited the polynucleotide of said polynucleotide construct.
[0054] Statement 23: The plant cell of statement 19, wherein said plant cell is a cell of a plant selected from the group consisting of: Arabidopsis thaliana, Brassica napus, Brassica rapa, rapeseed, sunflower, safflower, canola, corn, soybean, cotton, flax, jojoba, Chinese tallow tree, tobacco, cocoa, peanut, fruit plants, citrus plants, plants producing nuts, plants producing seeds, and plants producing berries.
[0055] Statement 24: A plant stably transformed with the polynucleotide of statement 9.
[0056] Statement 25: The plant of statement 24, wherein said plant is selected from the group consisting of: Arabidopsis thaliana, Brassica, rapeseed, sunflower, safflower, canola, corn, soybean, cotton, flax, jojoba, Chinese tallow tree, tobacco, cocoa, peanut, fruit plants, citrus plants, plants producing nuts, plants producing seeds, and plants producing berries.
[0057] Statement 26: A progeny of the plant of statement 24, wherein said progeny has inherited the polynucleotide of said polynucleotide construct.
[0058] Statement 27: A seed of said transgenic plant of statement 24.
[0059] Statement 28: A seed of said transgenic plant of statement 26.
[0060] Statement 29: A method of producing improved levels of stearodonic acid in a plant, comprising growing a transgenic plant comprising the desaturase molecule of statement 1, whereby the omega-3 fatty acid content of the seed is increased as compared to a seed of an isogenic plant lacking said desaturase molecule of statement 1.
[0061] Statement 30: A plant produced by the method of statement 29.
[0062] Statement 31: A progeny of the plant produced by the method of statement 29, wherein said progeny also exhibits the phenotype of increased omega-3 fatty acid production in the seed.
[0063] Statement 32: A seed of the plant of statement 30.
[0064] Statement 33: A method of producing improved levels of stearodonic acid in a plant, comprising growing a transgenic plant comprising a desaturase molecule selected from the group consisting of SEQ ID NO: 1 through SEQ ID NO: 331 whereby the omega-3 fatty acid content of the seed is increased as compared to a seed of an isogenic plant lacking said desaturase molecule.
[0065] Statement 34: A plant produced by the method of statement 33.
[0066] Statement 35: A progeny of the plant produced by the method of statement 32, wherein said progeny also exhibits the phenotype of increased omega-3 fatty acid production in the seed.
[0067] Statement 36: A seed of said plant of statement 34.
[0068] Statement 37: A method for selecting a delta-15 desaturase molecule producing improved levels of omega-3 fatty acids in yeast, comprising
   [0069] e. transforming a host cell with a transcribable polynucleotide encoding a desaturase molecule of statement 1;
   [0070] f. providing an appropriate substrate for said desaturase molecule to the yeast medium; and
   [0071] g. assaying the yeast culture for stearodonic acid production.
[0072] Statement 38: A method for assessing the oil composition of a seed of a plant comprising the desaturase of statement 1, comprising growing said plant, recovering a seed of said plant, extracting the oil molecules from said seed and assaying the oil composition.
[0073] Statement 39: A method for assessing the presence of the desaturase molecule of statement 1 in a plant or seed, comprising extracting said desaturase from a plant tissue.
[0074] Statement 40: A method for assaying stearodonic acid levels in plants, comprising extracting the stearodonic acid from a plant tissue.
[0075] Statement 41: A method of producing improved levels of stearodonic acid in a plant, comprising growing a transgenic plant comprising the desaturase molecule of statement 1, whereby the stearodonic acid content of the seed is increased as compared to a seed of an isogenic plant lacking said desaturase molecule of statement 1.
[0076] Statement 42: A method of producing food or feed, comprising the steps of:
   [0077] h. obtaining the plant of statement 24 or a part thereof; and
   [0078] i. producing said food or feed therefrom.
[0079] Statement 43: A food or feed composition produced by the method of statement 42.
[0080] Statement 44: A method of generating an enhanced desaturase, comprising:
   [0081] j. engineering a variant of a naturally-occurring desaturase; and
   [0082] k. analyzing the variants to identify those that:
      [0083] i. exhibits a substrate preference for Gamma Linolenic Acid (GLA) over Linoleic Acid (LA) of at least 1.75×, as measured in a yeast assay and as calculated by the formula (SDA/(SDA+GLA))/(ALA/(LA+ALA), where SDA is stearodonic acid, GLA is gamma linolenic acid, ALA is alpha linolenic acid, and LA is linoleic acid; or
      [0084] ii. exhibits a total conversion rate of GLA to SDA of at least 40%; or
      [0085] iii. when expressed in a transgenic plant, causes the transgenic plant to produce more omega-3 fatty acid than non-transgenic plants; or
      [0086] iv. when co-expressed with a delta-6 fatty acid desaturase in a transgenic plant, causes the transgenic plant to accumulate more SDA than ALA.
[0087] Statement 45: An isolated or recombinant polypeptide comprising an amino acid sequence with 90% sequence identity to the desaturase molecule of statement 1, wherein the amino acid sequence comprises at least one amino acid substitution or insertion in the putative alpha-helical region corresponding to positions 110-130, wherein the putative alpha-helical region is determined by MolSoft, ICMPRo or any comparable molecular modeling software.
[0088] Statement 46: An engineered polypeptide that exhibits delta-15 desaturase activity, wherein said polypeptide comprises a motif selected from the group consisting of:
   [0089] a. X₁X₂X₃X₄X₅NX₆X₇X₈, wherein Xᵢ represents a variable amino acid, wherein:
      [0090] (i) X₁ is selected from the group consisting of: D, R, E, P, N, Q, K and H; and
      [0091] (ii) X₂ is selected from the group consisting of: S, H, Y, N and P; and
      [0092] (iii) X₃ is selected from the group consisting of: K, N, Q, R and T; and
      [0093] (iv) X₄ is selected from the group consisting of: T, A, R, W and S; and
      [0094] (v) X₅ is selected from the group consisting of: I, F, V, W and L; and
      [0095] (vi) X₆ is selected from the group consisting of: T, D, N, Y and S; and
      [0096] (vii) X₇ is selected from the group consisting of: I, V, T and F; and
      [0097] (viii) X₈ is selected from the group consisting of: F, M, I and L;
   [0098] and
   [0099] b. X₉X₁₀X₁₁X₁₂X₁₃X₁₄X₁₅X₁₆X₁₇X₁₈X₁₉X₂₀, wherein Xᵢ represents a variable amino acid, wherein
      [0100] (i) X₉ is selected from the group consisting of: K, R and A; and
      [0101] (ii) X₁₀ is selected from the group consisting of: G, F, A, Y, N, D, V, C and S; and
      [0102] (iii) X₁₁ is selected from the group consisting of: T and H; and
      [0103] (iv) X₁₂ is selected from the group consisting of: G and N; and
      [0104] (v) X₁₃ is selected from the group consisting of: S, N, T, G, D, A, H, R and P; and
      [0105] (vi) X₁₄ is selected from the group consisting of: M, T and V; and
      [0106] (vii) X₁₅ is selected from the group consisting of: T, K, S, A and E; and
      [0107] (viii) X₁₆ is selected from the group consisting of: K, R and N; and
      [0108] (ix) X₁₇ is selected from the group consisting of: V, M, T, E, F, I and L; and
      [0109] (x) X₁₈ is selected from the group consisting of: V, A and S; and
      [0110] (xi) X₁₉ is selected from the group consisting of: F and W; and
      [0111] (xii) X₂₀ is selected from the group consisting of: I, V and H;
   [0112] and
   [0113] c. X₂₁X₂₂X₂₃X₂₄X₂₅SX₂₆X₂₇X₂₈X₂₉, wherein Xᵢ represents a variable amino acid, wherein
      [0114] (i) X₂₁ is selected from the group consisting of: P, R, K and S; and
      [0115] (ii) X₂₂ is selected from the group consisting of: D, R, E, G, S, N and K; and
      [0116] (iii) X₂₃ is selected from the group consisting of: V, L, T, Y, I and S; and
      [0117] (iv) X₂₄ is selected from the group consisting of: W, L, T, K, F, G, V, I, S and M; and
      [0118] (v) X₂₅ is selected from the group consisting of: I, K, L, W and R; and
      [0119] (vi) X₂₆ is selected from the group consisting of: M, S, I, F, L, A and T; and
      [0120] (vii) X₂₇ is selected from the group consisting of: A, L, W, H, Y, R, I, V, F and M; and
      [0121] (viii) X₂₈ is selected from the group consisting of: Y and H; and
      [0122] (ix) X₂₉ is selected from the group consisting of: F, V, L and T;
   [0123] and
   [0124] d. X₃₀X₃₁X₃₂X₃₃X₃₄X₃₅X₃₆X₃₇X₃₈X₃₉X₄₀, wherein Xᵢ represents a variable amino acid, wherein
      [0125] (i) X₃₀ is selected from the group consisting of: F, L, V, I and F; and
      [0126] (ii) X₃₁ is selected from the group consisting of: A, L, V, F, G and I; and
      [0127] (iii) X₃₂ is selected from the group consisting of: M, Y, T, V, A, N and S; and
      [0128] (iv) X₃₃ is selected from the group consisting of: A, I, V, L, T and S; and
      [0129] (v) X₃₄ is selected from the group consisting of: F, S, A, T and L; and
      [0130] (vi) X₃₅ is selected from the group consisting of: G, V, I, A and L; and
      [0131] (vii) X₃₆ is selected from the group consisting of: L, V, T and S; and
      [0132] (viii) X₃₇ is selected from the group consisting of: G, F, V, A, Y, L, C and W; and
      [0133] (ix) X₃₈ is selected from the group consisting of: Y, A, I, F and V; and
      [0134] (x) X₃₉ is selected from the group consisting of: L, F, C, V, G, A and W; and
      [0135] (xi) X₄₀ is selected from the group consisting of: A, G and L;
   [0136] and
   [0137] e. X₄₁X₄₂X₄₃X₄₄X₄₅X₄₆X₄₇X₄₈GX₄₉X₅₀, wherein Xᵢ represents a variable amino acid, wherein
      [0138] (i) X₄₁ is selected from the group consisting of: W, Y and C; and
      [0139] (ii) X₄₂ is selected from the group consisting of: A, T, I, P, N, S and L; and
      [0140] (iii) X₄₃ is selected from the group consisting of: L, A, T, I and S; and
      [0141] (iv) X₄₄ is selected from the group consisting of: Y, Q and F; and
      [0142] (v) X₄₅ is selected from the group consisting of: G, W, S and I; and
      [0143] (vi) X₄₆ is selected from the group consisting of: Y, F, I, V and L; and
      [0144] (vii) X₄₇ is selected from the group consisting of: L, M, I, V and F; and
      [0145] (viii) X₄₈ is selected from the group consisting of: Q, I and M; and
      [0146] (ix) X₄₉ is selected from the group consisting of: L, C, T, V, I, R, S, M, W and F; and
      [0147] (x) X₅₀ is selected from the group consisting of: V, T, F, M and I;
   [0148] and
   [0149] f. X₅₁X₅₂X₅₃X₅₄X₅₅X₅₆X₅₇X₅₈X₅₉X₆₀, wherein Xᵢ represents a variable amino acid, wherein
      [0150] (i) X₅₁ is selected from the group consisting of: T, P, V, R and Q; and
      [0151] (ii) X₅₂ is selected from the group consisting of: E, R, K, S, D, G and N; and
      [0152] (iii) X₅₃ is selected from the group consisting of: A, K, S, D, V, T, G, R and W; and
      [0153] (iv) X₅₄ is selected from the group consisting of: D, E, Y, F, V, H and L; and
      [0154] (v) X₅₅ is selected from the group consisting of: K, R, E, G, Y and F; and
      [0155] (vi) X₅₆ is selected from the group consisting of: N, D, G, A, I, S, P, H and T; and
      [0156] (vii) X₅₇ is selected from the group consisting of: L, E, Q, V, T, A, Y and W; and
      [0157] (viii) X₅₈ is selected from the group consisting of: R, P, L, M and E; and
      [0158] (ix) X₅₉ is selected from the group consisting of: K, P, A, L, T, N, H and D; and
      [0159] (x) X₆₀ is selected from the group consisting of: L, R, V, K and G;
   [0160] and
   [0161] g. X₆₁X₆₂X₆₃X₆₄X₆₅X₆₆X₆₇X₆₈X₆₉X₇₀, wherein Xᵢ represents a variable amino acid, wherein
      [0162] (i) X₆₁ is selected from the group consisting of: K, P, A, L, T, N, H and D; and
      [0163] (ii) X₆₂ is selected from the group consisting of: L, R, V, K and G; and
      [0164] (iii) X₆₃ is selected from the group consisting of: Y, E, D, F, H, N, T, S and A; and
      [0165] (iv) X₆₄ is selected from the group consisting of: M, F, K, V, L, H, N, D, Q, E, Y and I; and
      [0166] (v) X₆₅ is selected from the group consisting of: D, P, S, E, L, A and V; and
      [0167] (vi) X₆₆ is selected from the group consisting of: K, A, S, Y and D; and
      [0168] (vii) X₆₇ is selected from the group consisting of: V, E, A, R, L, M, F, I, W and G; and
      [0169] (viii) X₆₈ is selected from the group consisting of: E, T, W, L, D, V, F, Y, N, H, K and Q; and
      [0170] (ix) X₆₉ is selected from the group consisting of: E, A, F, K, S, N and D; and
      [0171] (x) X₇₀ is selected from the group consisting of: E and W;
   [0172] and
   [0173] h. X₇₁X₇₂X₇₃X₇₄X₇₅X₇₆X₇₇X₇₈X₇₉X₈₀X₈₁, wherein Xᵢ represents a variable amino acid, wherein
      [0174] (i) X₇₁ is selected from the group consisting of: Y, G, A and W; and
      [0175] (ii) X₇₂ is selected from the group consisting of: W, T, F, L, Y, N, I, S, K, Q, P and H; and
      [0176] (iii) X₇₃ is selected from the group consisting of: L, Q, P and F; and
      [0177] (iv) X₇₄ is selected from the group consisting of: M, G, L, F, V, I, S, A and T; and
      [0178] (v) X₇₅ is selected from the group consisting of: Y, A, S, T, G, W and R; and
      [0179] (vi) X₇₆ is selected from the group consisting of: L, I, V, F and T; and
      [0180] (vii) X₇₇ is selected from the group consisting of: L, C, T, A, K, I, V, F and T; and
      [0181] (viii) X₇₈ is selected from the group consisting of: F, A, T, N, I, S, L, M and V; and
      [0182] (ix) X₇₉ is selected from the group consisting of: N, Y, V, R, G, D, H, L and F; and
      [0183] (x) X₈₀ is selected from the group consisting of: V, L, I, A, W, Y, F, Q and E; and
      [0184] (xi) X₈₁ is selected from the group consisting of: S, T, P A and C;
   [0185] and
   [0186] i. X₈₂X₈₃X₈₄X₈₅X₈₆X₈₇X₈₈X₈₉X₉₀X₉₁X₉₂, wherein Xᵢ represents a variable amino acid, wherein
      [0187] (i) X₈₂ is selected from the group consisting of: V, G and S; and
      [0188] (ii) X₈₃ is selected from the group consisting of: K, N, D, Y, I, F and V; and
      [0189] (iii) X₈₄ is selected from the group consisting of: F, Q, I, L and V; and
      [0190] (iv) X₈₅ is selected from the group consisting of: S, G and T; and
      [0191] (v) X₈₆ is selected from the group consisting of: G, N, K, A, S and C; and
      [0192] (vi) X₈₇ is selected from the group consisting of: H, M, W, I, F, D, N, Y, G and R; and
      [0193] (vii) X₈₈ is selected from the group consisting of: E, G, K, T, A, N, D, R and S; and
      [0194] (viii) X₈₉ is selected from the group consisting of: A, G, S, C, E, R, T and K; and
      [0195] (ix) X₉₀ is selected from the group consisting of: P, W, Q, S, T and A; and
      [0196] (x) X₉₁ is selected from the group consisting of: H, L, Q, N and K; and
      [0197] (xi) X₉₂ is selected from the group consisting of: W, F, G, S and R;
   [0198] and
   [0199] j. X₉₃X₉₄X₉₅X₉₆X₉₇X₉₈X₉₉X₁₀₀X₁₀₁X₁₀₂X₁₀₃, wherein Xᵢ represents a variable amino acid, wherein
      [0200] (i) X₉₃ is selected from the group consisting of: F and Y; and
      [0201] (ii) X₉₄ is selected from the group consisting of: Q, E, D, S and W; and
      [0202] (iii) X₉₅ is selected from the group consisting of: T, P, S and A; and
      [0203] (iv) X₉₆ is selected from the group consisting of: V, I, G, S, A, T, K and Q; and
      [0204] (v) X₉₇ is selected from the group consisting of: P, A, S, T and D; and
      [0205] (vi) X₉₈ is selected from the group consisting of: L, V, I and F; and
      [0206] (vii) X₉₉ is selected from the group consisting of: Y, F, W and L; and
      [0207] (viii) X₁₀₀ is selected from the group consisting of: E, A, G, T, R, K, D and L; and
      [0208] (ix) X₁₀₁ is selected from the group consisting of: P, A, T, S, Q, H, K, N, D, E and R; and
      [0209] (x) X₁₀₂ is selected from the group consisting of: H, Q, N, K, S, R and E; and
      [0210] (xi) X₁₀₃ is selected from the group consisting of: Q, E and D;
   [0211] and
   [0212] k. X₁₀₄X₁₀₅X₁₀₆X₁₀₇X₁₀₈X₁₀₉X₁₁₀X₁₁₁X₁₁₂X₁₁₃X₁₁₄, wherein Xᵢ represents a variable amino acid, wherein
      [0213] (i) X₁₀₄ is selected from the group consisting of: R, A, S, F and G; and
      [0214] (ii) X₁₀₅ is selected from the group consisting of: K, H, I, W, P, S, V, N, M and R; and
      [0215] (iii) X₁₀₆ is selected from the group consisting of: N, L, D, W, Y, A and Q; and
      [0216] (iv) X₁₀₇ is selected from the group consisting of: I, V and C; and
      [0217] (v) X₁₀₈ is selected from the group consisting of: F, V, L, A, E and I; and
      [0218] (vi) X₁₀₉ is selected from the group consisting of: Y, I, L, M, T, V, W and A; and
      [0219] (vii) X₁₁₀ is selected from the group consisting of: S, L, V, F and W; and
      [0220] (viii) X₁₁₁ is selected from the group consisting of: N, D, L and G; and
      [0221] (ix) X₁₁₂ is selected from the group consisting of: C, I, L, K and G; and
      [0222] (x) X₁₁₃ is selected from the group consisting of: G, I, L, V, W, F and C; and
      [0223] (xi) X₁₁₄ is selected from the group consisting of: I, L, Q, W and C;
   [0224] and
   [0225] l. X₁₁₅X₁₁₆X₁₁₇X₁₁₈X₁₁₉X₁₂₀X₁₂₁X₁₂₂X₁₂₃, wherein Xᵢ represents a variable amino acid, wherein
      [0226] (i) X₁₁₅ is selected from the group consisting of: A, L, S and V; and
      [0227] (ii) X₁₁₆ is selected from the group consisting of: M, V, T, W, F and C; and
      [0228] (iii) X₁₁₇ is selected from the group consisting of: G, A, V, L, I and F; and
      [0229] (iv) X₁₁₈ is selected from the group consisting of: S, A, Y, F, L and G; and
      [0230] (v) X₁₁₉ is selected from the group consisting of: I, A, G and F; and
      [0231] (vi) X₁₂₀ is selected from the group consisting of: L, N, Y, A, I, F, V and H; and
      [0232] (vii) X₁₂₁ is selected from the group consisting of: T, W, Y, A, L, F and S; and
      [0233] (viii) X₁₂₂ is selected from the group consisting of: Y, Q, L, G, T, W and F; and
      [0234] (ix) X₁₂₃ is selected from the group consisting of: L, A, W, C and I;
   [0235] and
   [0236] m. X₁₂₄X₁₂₅X₁₂₆X₁₂₇X₁₂₈X₁₂₉, wherein Xᵢ represents a variable amino acid, wherein
      [0237] (i) X₁₂₄ is selected from the group consisting of: H, A, V, S, L, G and P; and
      [0238] (ii) X₁₂₅ is selected from the group consisting of: W, F and M; and
      [0239] (iii) X₁₂₆ is selected from the group consisting of: I, L, F and V; and
      [0240] (iv) X₁₂₇ is selected from the group consisting of: V, I, L, F, M and D; and
      [0241] (v) X₁₂₈ is selected from the group consisting of: C, A, F, V and I; and
      [0242] (vi) X₁₂₉ is selected from the group consisting of: I, V and T;
[0243] wherein any of the non-variable amino acids may be replaced with a conservative substitution.
[0244] Statement 47: The engineered desaturase of statement 46, wherein one or more of the variable amino acids within a motif is deleted.
[0245] Statement 48: The engineered desaturase of statement 46, wherein there is one or more amino acid insertions in any one of said motifs.

### BRIEF DESCRIPTION OF THE FIGURES

[0246] The following drawings form part of the present specification and are included to further demonstrate certain aspects of the present invention. The invention may be better understood by reference to one or more of these drawings in combination with the detailed description of specific embodiments presented herein. The invention can be more fully understood from the following description of the figure(s):

[0247] FIG. 1: Diagrammatic representation of the preferred conversion pathway of the native delta-15 desaturase and the preferred pathway of the engineered desaturase of the present invention

[0248] FIG. 2: multiple sequence alignment highlighting the regions of high diversity within the domains of delta-15 desaturases

### DETAILED DESCRIPTION OF THE INVENTION

[0249] The present invention overcomes the limitations of the prior art by providing methods and compositions for creation of plants with improved PUFA content. The modification of fatty acid content of an organism such as a plant presents many advantages, including improved nutrition and health benefits. Modification of fatty acid content can be used to achieve beneficial levels or profiles of desired PUFAs in plants, plant parts, and plant products, including plant seed oils. For example, when the desired PUFAs are produced in the seed tissue of a plant, the oil may be isolated from the seeds typically resulting in an oil high in desired PUFAs or an oil having a desired fatty acid content or profile, which may in turn be used to provide beneficial characteristics in food stuffs and other products. The invention in particular provides endogenous oils having SDA while also containing a beneficial oleic acid content.

[0250] Various aspects of the present invention include methods and compositions for modification of PUFA content of a cell, for example, modification of the PUFA content of a plant cell(s). Compositions related to the invention include novel isolated polynucleotide sequences, polynucleotide constructs and plants and/or plant parts transformed by polynucleotides of the invention. The isolated polynucleotide may encode a fatty acid desaturase and, in particular, may encode an engineered Δ15-desaturase. Host cells may be manipulated to express a polynucleotide encoding a desaturase polypeptide(s) that catalyzes desaturation of a fatty acid(s).

[0251] Some aspects of the present invention include various desaturase polypeptides and polynucleotides encoding the same. Various embodiments of the invention may use different combinations of desaturase polynucleotides and the encoded polypeptides, depending upon the host cell, the availability of substrate(s), and the desired end product(s).

### Polynucleotide Molecules, Polypeptide Molecules, Motifs, Fragments, Chimeric Molecules

[0252] The following definitions and methods are provided to better define the present invention and to guide those of ordinary skill in the art in the practice of the present invention. Unless otherwise noted, terms are to be understood according to conventional usage by those of ordinary skill in the relevant art.

[0253] As used herein, the term “polynucleotide molecule” refers to the single- or double-stranded DNA or RNA molecule of genomic or synthetic origin, i.e., a polymer of deoxyribonucleotide or ribonucleotide bases, respectively, read from the 5′ (upstream) end to the 3′ (downstream) end. As used herein, the term “polynucleotide sequence” refers to the sequence of a polynucleotide molecule. The nomenclature for nucleotide bases as set forth at 37 CFR § 1.822 is used herein.

[0254] The term “polypeptide” refers to any chain of amino acids, regardless of length or post-translational modification (e.g., glycosylation or phosphorylation). Considerations for choosing a specific polypeptide having desaturase activity include, but are not limited to, the pH optimum of the polypeptide, whether the polypeptide is a rate limiting enzyme or a component thereof, whether the desaturase used is essential for synthesis of a desired PUFA, and/or a co-factor is required by the polypeptide. The expressed polypeptide may have characteristics that are compatible with the biochemical environment of its location in the host cell. For example, the polypeptide may have to compete for substrate(s).

[0255] “Desaturase” refers to a polypeptide that can desaturate, or catalyze formation of a double bond between, consecutive carbons of one or more fatty acids to produce a mono- or poly-unsaturated fatty acid or precursor thereof. Of particular interest are polypeptides that can catalyze the conversion of stearic acid to oleic acid, oleic acid to LA, LA to ALA, or GLA to SDA, which includes enzymes that desaturate at the 12, 15, or 6 positions. Preferred desaturases of the present invention include those that desaturate at the 15 position of the fatty acid chain.

[0256] As used herein, the term “fragment” or “fragment thereof” refers to a finite polynucleotide sequence length that comprises at least 25, at least 50, at least 75, at least 85, or at least 95 contiguous nucleotide bases, wherein its complete sequence in entirety is identical to a contiguous component of the referenced polynucleotide molecule. The term “fragment” also references a finite polypeptide length that comprises at least 10, at least 25, at least 50, at least 75, at least 100 or at least 150 contiguous amino acids, wherein its complete sequence in entirety is identical to a contiguous component of the referenced polynucleotide molecule. The polypeptide fragment exhibits some level of desaturase activity.

[0257] As used herein, the term “chimeric” refers to the product of the fusion of portions of two or more different polynucleotide or polypeptide molecules. As used herein, the term “chimeric” refers to a desaturase molecule produced through the concatenation of polynucleotide molecules or polypeptide molecules of known desaturases or other polypeptide molecules, or any copies thereof.

[0258] The phrases “coding sequence,” “structural sequence,” and “transcribable polynucleotide sequence” refer to a physical structure comprising an orderly arrangement of nucleic acids. The nucleic acids are arranged in a series of nucleic acid triplets that each form a codon. Each codon encodes for a specific amino acid. Thus the coding sequence, structural sequence, and transcribable polynucleotide sequence encode a series of amino acids forming a protein, polypeptide, or peptide sequence. The coding sequence, structural sequence, and transcribable polynucleotide sequence may be contained, without limitation, within a larger nucleic acid molecule, vector, etc. In addition, the orderly arrangement of nucleic acids in these sequences may be depicted, without limitation, in the form of a sequence listing, figure, table, electronic medium, etc.

[0259] As used herein, the term “parent” or “parental” refers to a molecule or a set of molecules that are analyzed for desired properties and from which novel, engineered molecules may be designed.

[0260] The term “engineered” refers to any polynucleotide or polypeptide molecule that has been created from manipulation of at least one parental sequence, such that the resultant molecular sequence is not identical to that of the parental molecule. Such a resultant molecule that is engineered from a parental molecule is referred to as a “variant”.

[0261] As used herein, the term “operably linked” refers to a first polynucleotide molecule, such as a promoter, connected with a second transcribable polynucleotide molecule, such as a gene of interest, where the polynucleotide molecules are so arranged that the first polynucleotide molecule affects the function of the second polynucleotide molecule. The two polynucleotide molecules may or may not be part of a single contiguous polynucleotide molecule and may or may not be adjacent. For example, a promoter is operably linked to a gene of interest if the promoter regulates or mediates transcription of the gene of interest in a cell.

[0262] The invention disclosed herein provides for polypeptide molecules that exhibit delta-15 desaturase enzymatic activity, and methods for producing and using the same.

### Polynucleotide Isolation and Modification

[0263] Any number of methods well known to those skilled in the art can be used to isolate a polynucleotide molecule, or fragment thereof, disclosed in the present invention. For example, PCR (polymerase chain reaction) technology can be used to amplify flanking regions from a genomic library of a plant using publicly available sequence information. A number of methods are known to those of skill in the art to amplify unknown polynucleotide molecules adjacent to a core region of known polynucleotide sequence. Methods include but are not limited to inverse PCR (IPCR), vectorette PCR, Y-shaped PCR, and genome walking approaches. Polynucleotide fragments can also be obtained by other techniques such as by directly synthesizing the fragment by chemical means, as is commonly practiced by using an automated oligonucleotide synthesizer.

[0264] As used herein, the term “isolated polynucleotide molecule” refers to a polynucleotide molecule at least partially separated from other molecules normally associated with it in its native state. In one embodiment, the term “isolated” is also used herein in reference to a polynucleotide molecule that is at least partially separated from nucleic acids that normally flank the polynucleotide in its native state. Thus, polynucleotides fused to regulatory or coding sequences with which they are not normally associated, for example as the result of recombinant techniques, are considered isolated herein. Such molecules are considered isolated even when present, for example in the chromosome of a host cell, or in a nucleic acid solution. The term “isolated” as used herein is intended to encompass molecules not present in their native state.

[0265] Those of skill in the art are familiar with the standard resource materials that describe specific conditions and procedures for the constriction, manipulation, and isolation of macromolecules (e.g., polynucleotide molecules, plasmids, etc.), as well as the generation of recombinant organisms and the screening and isolation of polynucleotide molecules.

[0266] Short nucleic acid sequences having the ability to specifically hybridize to complementary nucleic acid sequences may be produced and utilized in the present invention. These short nucleic acid molecules may be used as probes to identify the presence of a complementary nucleic acid sequence in a given sample. Thus, by constructing a nucleic acid probe that is complementary to a small portion of a particular nucleic acid sequence, the presence of that nucleic acid sequence may be detected and assessed. Use of these probes may greatly facilitate the identification of transgenic plants that contain the presently disclosed nucleic acid molecules. The probes may also be used to screen cDNA or genomic libraries for additional nucleic acid sequences related or sharing homology to the presently disclosed promoters and transcribable polynucleotide sequences. The short nucleic acid sequences may be used as probes and specifically as PCR probes. A PCR probe is a nucleic acid molecule capable of initiating a polymerase activity while in a double-stranded structure with another nucleic acid. Various methods for determining the structure of PCR probes and PCR techniques exist in the art. Computer generated searches using programs such as Primer3, STSPipeline, or GeneUp (Pesole, et al., 1998), for example, can be used to identify potential PCR primers.

[0267] Alternatively, the short nucleic acid sequences may be used as oligonucleotide primers to amplify or mutate a complementary nucleic acid sequence using PCR technology. These primers may also facilitate the amplification of related complementary nucleic acid sequences (e.g. related nucleic acid sequences from other species).

[0268] The primer or probe is generally complementary to a portion of a nucleic acid sequence that is to be identified, amplified, or mutated. The primer or probe should be of sufficient length to form a stable and sequence-specific duplex molecule with its complement. The primer or probe in some embodiments is about 10 to about 200 nucleotides long, in some embodiments is about 10 to about 100 nucleotides long, in some embodiments is about 10 to about 50 nucleotides long, and in some embodiments is about 14 to about 30 nucleotides long. The primer or probe may be prepared by direct chemical synthesis, by PCR (See, for example, U.S. Pat. Nos. 4,683,195, and 4,683,202, each of which is herein incorporated by reference), or by excising the nucleic acid specific fragment from a larger nucleic acid molecule.

[0269] The term “recombinant vector” as used herein, includes any recombinant segment of DNA that one desires to introduce into a host cell, tissue and/or organism, and specifically includes expression cassettes isolated from a starting polynucleotide. A recombinant vector may be linear or circular. In various aspects, a recombinant vector may comprise at least one additional sequence chosen from the group consisting of: regulatory sequences operatively linked to the polynucleotide; selection markers operatively coupled to the polynucleotide; marker sequences operatively coupled to the polynucleotide; a purification moiety operatively coupled to the polynucleotide; and a targeting sequence operatively coupled to the polynucleotide.

### Modifications and Engineering of the Desaturase Molecular Sequence

[0270] A number of enzymes are involved in PUFA biosynthesis. LA, (18:2, Δ9, 12) is produced from oleic acid (OA, 18:1, Δ9) by a Δ12-desaturase, while ALA (18:3) is produced from LA by a Δ15-desaturase. SDA (18:4, Δ6, 9, 12, 15) and GLA (18:3, Δ6, 9, 12) are produced from LA and ALA by a Δ6-desaturase. However, as stated above, mammals cannot desaturate beyond the Δ9 position and therefore cannot convert oleic acid into LA. Likewise, ALA cannot be synthesized by mammals. Other eukaryotes, including fungi and plants, have enzymes that desaturate at the carbon 12 and carbon 15 position. The major poly unsaturated fatty acids of animals therefore are derived from diet via the subsequent desaturation and elongation of dietary LA and ALA.

[0271] U.S. Pat. No. 5,952,544 (herein incorporated by reference in its entirety) describes nucleic acid fragments isolated and cloned from Brassica napus that encode fatty acid desaturase enzymes. Expression of these fragments in plants results in accumulation of ALA. However, these plants also accumulate LA, which remains unconverted by the desaturase. An enzyme that converts more LA to ALA would be advantageous. Increased conversion from LA to ALA would create greater amounts of ALA. Increased ALA levels allow the Δ6-desaturase, when co-expressed with a nucleic acid encoding for the Δ15-desaturase, to act upon the ALA, thereby producing greater levels of SDA. Because of the multitude of beneficial uses for SDA, the present invention encompasses the recognition that it would be desirable to create a substantial increase in the yield of SDA. Nucleic acids from various sources have been sought to increase SDA yield. Further, innovations that would allow for improved commercial production in land-based crops are still highly desired. (See, e.g., Reed et al., 2000).

[0272] Fatty acid desaturases are enzymes that introduce double bonds into fatty acyl chains. They are present in all groups of organisms, i.e., bacteria, fungi, plants and animals, and play a key role in the maintenance of the proper structure and functioning of biological membranes. With the exception of the stearoyl-ACP desaturase and its relatives from plants, fatty acids desaturases are integral membrane proteins, believed to contain two iron atoms in their active site. All known desaturases are characterized by the presence of three histidine clusters, which are localized at strongly conserved positions in the amino acid sequence of each protein. It has been suggested that these clusters might be involved in the formation of the active site of each desaturase, as has been demonstrated in other di-iron enzymes. It is assumed in the current scientific literature that the histidine clusters and iron ions constitute the catalytic centre of the desaturase, although other regions of the protein have been shown to impact enzymatic activity.

[0273] Nucleic acids encoding Δ15-desaturases have been isolated from several species of cyanobacteria, fungi (including Saccharomyces, Botrytis, Chlorella, Aspergillus, Mortierella and Neurospora) and plants (including Arabidopsis, soybean, and parsley). Structural models of the protein family have been generated for several species (Diaz et al. 2002; Knipple et al., 2002; Sasata et al., 2004; Sperling et al., 2003). Proteins that are known desaturases share the common PFAM domain PF00487. Key structural features of desaturases localized to the endoplasmic reticulum membrane include: two membrane anchor regions (domains B and E), each consisting of two transmembrane domains; a presumed active site formed by the interaction of domains C, D, F, and G; three histidine residues extended away from the cytosolic face of the membrane that coordinate binding of iron, which plays a role in catalysis; and probable presentation of the substrate to the enzyme in the membrane (as opposed to from the cytosol). The deduced amino acid sequences of these desaturases demonstrate some degree of similarity, most notably in the region of three histidine-rich motifs that, without being bound by any one theory, are believed to be involved in iron binding. Delta-15 desaturases desaturate both LA to produce ALA, and GLA to produce SDA. The known native enzymes either prefer LA as a substrate over GLA, or do not exhibit a preference for either substrate. The present invention includes and provides delta-15 desaturases that exhibit both increased enzymatic activity and improved substrate selectivity of GLA vs. LA, as compared to the native wild-type enzyme.

[0274] If desired, the regions of a desaturase polypeptide important for desaturase activity may be manipulated through means such as gene engineering or routine mutagenesis followed by expression of the resulting mutant polypeptides and determination of their activities. Mutants may include substitutions, deletions, insertions and point mutations, combinations thereof, or other types of sequence manipulations. Substitutions may be made on the basis of conserved hydrophobicity or hydrophilicity (Kyte and Doolittle, 1982), or on the basis of the ability to assume similar polypeptide secondary structure (Chou and Fasman. 1978). A typical functional analysis begins with deletion mutagenesis to determine the N- and C-terminal limits of the protein necessary for function, and then internal deletions, insertions or point mutants are made to further determine regions necessary for function. Other techniques such as cassette mutagenesis or total synthesis also can be used. Deletion mutagenesis is accomplished, for example, by using exonucleases to sequentially remove the 5′ or 3′ coding regions. Kits are available for such techniques. After deletion, the coding region is completed by ligating oligonucleotides containing start or stop codons to the deleted coding region after 5′ or 3′ deletion, respectively. Alternatively, oligonucleotides encoding start or stop codons are inserted into the coding region by a variety of methods including site-directed mutagenesis, mutagenic PCR or by ligation onto DNA digested at existing restriction sites.

[0275] Internal deletions can similarly be made through a variety of methods including the use of existing restriction sites in the DNA, by use of mutagenic primers via site directed mutagenesis or mutagenic PCR. Insertions are made through methods such as linker-scanning mutagenesis, site-directed mutagenesis or mutagenic PCR. Point mutations are made through techniques such as site-directed mutagenesis or mutagenic PCR. Chemical mutagenesis may also be used for identifying regions of a desaturase polypeptide important for activity. Such structure-function analysis can determine which regions may be deleted, which regions tolerate insertions, and which point mutations allow the mutant protein to function in substantially the same way as the native desaturase. All such mutant proteins and nucleotide sequences encoding them are within the scope of the present invention.

[0276] Desaturase molecules may be engineered or designed to optimize a particular phenotype. For example, a delta-15 desaturase gene may be engineered to provide an increased expression level of a product in a host cell or organism, to preferentially interact with one substrate molecule over another, or to exhibit an altered kinetic profile.

[0277] The term “engineered” refers to any polynucleotide or polypeptide molecule that has been created from manipulation of at least one parental sequence, such that the resultant molecular sequence is not identical to that of the parental molecule. Various techniques for effecting such changes are known in the art. For example, such molecules may be generated by interchanging one or more amino acids identified from one desaturase with those identified from a different desaturase. Another example would be the introduction of conservative or non-conservative amino acid changes to the native parent molecule. Yet another example would be the creation of a chimeric molecule comprising fragments of sequences from different parental molecules. Engineered delta-15 desaturases of the present invention include those generated by the manipulation of regions identified from a parental fungal delta-15 desaturase, in particular a delta-15 desaturase from Mortierella alpina. It is contemplated that delta-15 desaturase molecules identified from other organisms could also be used to engineer variants that exhibit a particular desired phenotype or activity.

[0278] Thus, the design and production of delta-15 desaturases that exhibit an improved phenotype over known wild-type desaturases is one aspect of the present invention. Preferred embodiments include delta-15 desaturases that prefer the substrate GLA over LA, thereby producing SDA in preference to ALA.

[0279] The molecules disclosed in the present invention are illustrative of such engineered delta-15 desaturases. Briefly, sequence alignments of delta-15 desaturases from various sources, including Mortierella alpina, Neurospora crassa, Saccharomyces kluyveri, Aspergillus nidulans and Chlorella vulgaris, revealed regions of the molecules that comprise highly variable amino acid sequences in addition to more conserved regions. The regions of high diversity were selected for molecular engineering experiments for the purpose of generating molecules with novel characteristics, such as substrate preference and/or enzymatic activity. Using the Mortierella alpina delta-15 desaturase protein as a parent protein, changes were designed in these highly variable regions to sample from the diversity observed in naturally occurring delta-15 desaturases. Additional conservative amino acid substitutions were included in the designs as well. Polynucleotide sequences were then engineered to correspond to the amino acid variants designed from the bioinformatics analysis.

### Enzyme Activity and Kinetics

[0280] Analyses of the Kₘ (Michaelis constant) and specific activity of a polypeptide in question may be considered in determining the suitability of a given polypeptide for modifying PUFA(s) production, level, or profile in a given host cell. The polypeptide used in a particular situation is one that typically can function under the conditions present in the intended host cell, but otherwise may be any desaturase polypeptide having a desired characteristic or being capable of modifying the relative production, level or profile of a desired PUFA(s) or any other desired characteristics as discussed herein. The substrate(s) for the expressed enzyme may be produced by the host cell or may be exogenously supplied. To achieve expression, the polypeptide(s) of the instant invention are encoded by polynucleotides as described below.

[0281] The inventors have engineered enzymes from parental fungal enzymes. Fungal sources can include, but are not limited to, the genus Aspergillus, e.g., Aspergillus nidulans; the genus Botrytis, e.g., Botrytis cinerea; the genus Neurospora, e.g., Neurospora crassa; the genus Mortierella, e.g. Mortierella alpina; and other fungi that exhibit Δ15-desaturase activity.

[0282] The polynucleotide molecules encoding the engineered Δ15-desaturase may be expressed in transgenic plants, microorganisms or animals to effect greater synthesis of SDA from GLA. Other polynucleotides that are substantially identical to the disclosed Δ15-desaturase polynucleotides, or that encode polypeptides that are substantially identical to the disclosed Δ15-desaturase polypeptide, may also be used.

[0283] Encompassed by the present invention are molecules engineered from at least one known desaturase. Such known desaturases include variants of the disclosed Δ15-desaturases, or desaturases naturally occurring within a species of fungus. Desaturases may be identified by their ability to catalyze the formation of a double bond between two consecutive amino acids of a fatty acid chain. Desaturases may also be identified by screening sequence databases for sequences homologous to the disclosed desaturases, by hybridization of a probe based on the disclosed desaturases to a library constructed from the source organism, or by RT-PCR using mRNA from the source organism and primers based on the disclosed desaturases. Desaturase activity may further be elucidated by screening host organisms for production of said desaturase, or by screening the host organism for the product of the desaturase.

[0284] Certain aspects of the invention include variants and fragments of engineered Δ15-desaturase polypeptides that exhibit desaturase activity, and the nucleic acids encoding such. In another aspect of the invention, a vector comprising a nucleic acid, or fragment thereof, comprising a promoter, a Δ15-desaturase coding sequence and a termination region may be transferred into an organism in which the promoter and termination regions are functional. Accordingly, organisms producing an engineered Δ15-desaturase are provided by this invention. Yet another aspect of this invention provides an isolated, engineered Δ15-desaturase that can be purified from the recombinant organisms by standard methods of protein purification. (For example, see Ausubel et al., 1987).

### Determination of Sequence Similarity Using Hybridization Techniques

[0285] Nucleic acid hybridization is a technique well known to those of skill in the art of DNA manipulation. The hybridization properties of a given pair of nucleic acids are an indication of their similarity or identity.

[0286] The term “hybridization” refers generally to the ability of nucleic acid molecules to join via complementary base strand pairing. Such hybridization may occur when nucleic acid molecules are contacted under appropriate conditions. “Specifically hybridizes” refers to the ability of two nucleic acid molecules to form an anti-parallel, double-stranded nucleic acid structure. A nucleic acid molecule is said to be the “complement” of another nucleic acid molecule if they exhibit “complete complementarity,” i.e., each nucleotide in one sequence is complementary to its base pairing partner nucleotide in another sequence. Two molecules are said to be “minimally complementary” if they can hybridize to one another with sufficient stability to permit them to remain annealed to one another under at least conventional “low-stringency” conditions. Similarly, the molecules are said to be “complementary” if they can hybridize to one another with sufficient stability to permit them to remain annealed to one another under conventional “high-stringency” conditions. Nucleic acid molecules that hybridize to other nucleic acid molecules, e.g., at least under low stringency conditions, are said to be “hybridizable cognates” of the other nucleic acid molecules. Conventional low stringency and high stringency conditions are described herein and by Sambrook et al., Molecular Cloning, A Laboratory Manual, 2nd Ed., Cold Spring Harbor Press, Cold Spring Harbor, N.Y. (1989) and by Haymes et al., 1985. Departures from complete complementarity are permissible, as long as such departures do not completely preclude the capacity of the molecules to form a double-stranded structure.

[0287] Low stringency conditions may be used to select nucleic acid sequences with lower sequence identities to a target nucleic acid sequence. One may wish to employ conditions such as about 0.15 M to about 0.9 M sodium chloride, at temperatures ranging from about 20° C. to about 55° C. High stringency conditions may be used to select for nucleic acid sequences with higher degrees of identity to the disclosed nucleic acid sequences (Sambrook et al., 1989). High stringency conditions typically involve nucleic acid hybridization in about 2× to about 10×SSC (diluted from a 20×SSC stock solution containing 3 M sodium chloride and 0.3 M sodium citrate, pH 7.0 in distilled water), about 2.5× to about 5×Denhardt's solution (diluted from a 50× stock solution containing 1% (w/v) bovine serum albumin, 1% (w/v) ficoll, and 1% (w/v) polyvinylpyrrolidone in distilled water), about 10 mg/mL to about 100 mg/mL fish sperm DNA, and about 0.02% (w/v) to about 0.1% (w/v) SDS, with an incubation at about 50° C. to about 70° C. for several hours to overnight. High stringency conditions may be provided by 6×SSC, 5×Denhardt's solution, 100 mg/mL fish sperm DNA, and 0.1% (w/v) SDS, with an incubation at 55° C. for several hours. Hybridization is generally followed by several wash steps. The wash compositions generally comprise 0.5× to about 10×SSC, and 0.01% (w/v) to about 0.5% (w/v) SDS with a 15 minute incubation at about 20° C. to about 70° C. In one embodiment, the nucleic acid segments remain hybridized after washing at least one time in 0.1×SSC at 65° C.

[0288] A nucleic acid molecule in one embodiment of the present invention comprises a nucleic acid sequence that hybridizes, under low or high stringency conditions, with SEQ ID NO: 332 through SEQ ID NO: 662, any complements thereof, or any fragments thereof, or any cis elements thereof. A nucleic acid molecule in one embodiment of the present invention comprises a nucleic acid sequence that hybridizes under high stringency conditions with SEQ ID NO: 332 through SEQ ID NO: 662, any complements thereof, or any fragments thereof, or any cis elements thereof.

### Analysis of Sequence Similarity Using Identity Scoring

[0289] As used herein “sequence identity” refers to the extent to which two optimally aligned polynucleotide or peptide sequences are invariant throughout a window of alignment of components, e.g., nucleotides or amino acids. An “identity fraction” for aligned segments of a test sequence and a reference sequence is the number of identical components that are shared by the two aligned sequences divided by the total number of components in reference sequence segment, i.e., the entire reference sequence or a smaller defined part of the reference sequence.

[0290] As used herein, the term “percent sequence identity” or “percent identity” refers to the percentage of identical nucleotides in a linear polynucleotide sequence of a reference (“query”) polynucleotide molecule (or its complementary strand) as compared to a test (“subject”) polynucleotide molecule (or its complementary strand) when the two sequences are optimally aligned (with appropriate nucleotide insertions, deletions, or gaps totaling less than 20 percent of the reference sequence over the window of comparison). Optimal alignment of sequences for aligning a comparison window are well known to those skilled in the art and may be conducted by tools such as the local homology algorithm of Smith and Waterman, the homology alignment algorithm of Needleman and Wunsch, the search for similarity method of Pearson and Lipman, and preferably by computerized implementations of these algorithms such as GAP, BESTFIT. FASTA, and TFASTA available as part of the GCG® Wisconsin Package® (Accelrys Inc., San Diego, Calif.). An “identity fraction” for aligned segments of a test sequence and a reference sequence is the number of identical components that are shared by the two aligned sequences divided by the total number of components in the reference sequence segment, i.e., the entire reference sequence or a smaller defined part of the reference sequence. Percent sequence identity is represented as the identity fraction multiplied by 100. The comparison of one or more polynucleotide sequences may be to a full-length polynucleotide sequence or a portion thereof, or to a longer polynucleotide sequence. For purposes of this invention “percent identity” may also be determined using BLASTX version 2.0 for translated nucleotide sequences and BLASTN version 2.0 for polynucleotide sequences. Each of the aforementioned algorithms is well known in the art.

[0291] As used herein, the term “substantial percent sequence identity” refers to a percent sequence identity of at least about 70% sequence identity, at least about 80% sequence identity, at least about 85% identity, at least about 90% sequence identity, or even greater sequence identity, such as about 95%, 96%, 97% 98% or about 99% sequence identity with a molecular sequence described herein. Molecules that provide delta-15 desaturase activity and have a substantial percent sequence identity to the molecules provided herein are encompassed within the scope of this invention. “Substantially identical” refers to an amino acid sequence or nucleic acid sequence exhibiting at least 70%, 80%, 85%, 90% or 95% or even greater identity such as 96%, 97%, 98%, or 99% identity to the parental Δ15-desaturase amino acid sequence or nucleic acid sequence encoding the amino acid sequence. Polypeptide or polynucleotide comparisons may be carried out using sequence analysis software, for example, the Sequence Analysis software package of the GCG Wisconsin Package (Accelrys, San Diego, Calif.), MEGAlign (DNAStar, Inc., 1228 S. Park St., Madison, Wis. 53715), and MacVector (Oxford Molecular Group, 2105 S. Bascom Avenue, Suite 200, Campbell, Calif. 95008). Such software matches similar sequences by assigning degrees of similarity or identity.

[0292] “Homology” refers to the level of similarity between two or more nucleic acid or amino acid sequences in terms of percent of positional identity (i.e., sequence similarity or identity). Homology also refers to the concept of similar functional properties among different nucleic acids or proteins.

[0293] For purposes of this invention “percent identity” may also be determined using BLASTX version 2.0 for translated nucleotide sequences and BLASTN version 2.0 for polynucleotide sequences. In a preferred embodiment of the present invention, the presently disclosed delta-15 desaturase molecules comprise nucleic acid molecules or fragments having a BLAST score of more than 200, preferably a BLAST score of more than 300, and even more preferably a BLAST score of more than 400 with their respective homologues.

### Regulatory Elements Controlling the Expression of the Desaturase Gene

[0294] Regulatory elements, such as promoters, play a pivotal role in enhancing the agronomic, pharmaceutical or nutritional value of crops. Examples of promoters include constitutive promoters such as those disclosed in U.S. Pat. No. 5,641,876 (rice actin promoter, herein incorporated by reference in its entirety) U.S. Pat. No. 6,177,611 (constitutive maize promoters, herein incorporated by reference in its entirety), U.S. Pat. Nos. 5,322,938, 5,352,605, 5,359,142 and 5,530,196, all of which are herein incorporated by reference in their entireties (35S promoter); specific promoters such as those disclosed in U.S. Pat. No. 6,433,252 (maize L3 oleosin promoter, P-Zm.L3, herein incorporated by reference in its entirety), U.S. Pat. No. 5,837,848 (root specific promoter, herein incorporated by reference in its entirety), U.S. Pat. No. 6,294,714 (light inducible promoters, herein incorporated by reference in its entirety), U.S. Pat. No. 6,140,078 (salt inducible promoters, herein incorporated by reference in its entirety), U.S. Pat. No. 6,252,138 (pathogen inducible promoters, herein incorporated by reference in its entirety), U.S. Pat. No. 6,175,060 herein incorporated by reference in its entirety (phosphorus deficiency inducible promoters), U.S. Pat. No. 6,635,806 herein incorporated by reference in its entirety (gama-coixin promoter, P-Cl.Gcx), and U.S. patent application Ser. No. 09/757,089 herein incorporated by reference in its entirety (maize chloroplast aldolase promoter), all of which are incorporated herein by reference in their entirety. Examples of useful tissue-specific, developmentally-regulated promoters include the β-conglycinin 7Sα promoter (Doyle et al., 1986; Tierney et al., 1987), and seed-specific promoters (Knutzon, et al., 1992; Bustos, et al., 1991; Lam and Chua, 1991). Plant functional promoters useful for preferential expression in seed plastid include those from plant storage proteins and from proteins involved in fatty acid biosynthesis in oilseeds. Examples of such promoters include the 5′ regulatory regions from such transcribable polynucleotide sequences as napin (Kridl et al., 1991), phaseolin, zein, soybean trypsin inhibitor, ACP, stearoyl-ACP desaturase, and oleosin. Seed-specific regulation is discussed in EP 0 255 378 (herein incorporated by reference in its entirety). Another exemplary tissue-specific promoter is the lectin promoter, which is specific for seed tissue. The lectin protein in soybean seeds is encoded by a single transcribable polynucleotide sequence (Le1) that is only expressed during seed maturation and accounts for about 2 to about 5% of total seed mRNA. The lectin transcribable polynucleotide sequence and seed-specific promoter have been fully characterized and used to direct seed specific expression in transgenic tobacco plants (Vodkin, et al., 1983; Lindstrom, et al., 1990).

[0295] Polynucleotides encoding desaturases may be placed under transcriptional control of a promoter. In some cases this leads to an increase in the amount of desaturase enzyme expressed and concomitantly an increase in the fatty acid produced as a result of the reaction catalyzed by the enzyme. There is a wide variety of plant promoter sequences that may be used to drive tissue-specific expression of polynucleotides encoding desaturases in transgenic plants. For instance, the napin promoter and the acyl carrier protein promoters have previously been used in the modification of seed oil composition by expression of an antisense form of a desaturase (Knutzon et al. 1999). Similarly, the promoter for the β-subunit of soybean β-conglycinin has been shown to be highly active and to result in tissue-specific expression in transgenic plants of species other than soybean (Bray et al., 2004). Arondel et al. (1992) increased the amount of linolenic acid (18:3) in tissues of transgenic Arabidopsis plants by placing the endoplasmic reticulum-localized fad3 gene under transcriptional control of the strong constitutive cauliflower mosaic virus 35S promoter.

### Constructs and Vectors

[0296] Nucleic acid constructs may be provided that integrate into the genome of a host cell or are autonomously replicated (e.g., episomally replicated) in the host cell. For production of ALA and/or SDA, the expression cassettes, (i.e., a polynucleotide encoding a protein that is operatively linked to nucleic acid sequence(s) that directs the expression of the polynucleotide) generally used include an expression cassette that provides for expression of a polynucleotide encoding a Δ15-desaturase. In certain embodiments a host cell may have wild type fatty acid content.

[0297] As used herein, the term “construct” means any recombinant polynucleotide molecule such as a plasmid, cosmid, virus, autonomously replicating polynucleotide molecule, phage, or linear or circular single-stranded or double-stranded DNA or RNA polynucleotide molecule, derived from any source, capable of genomic integration or autonomous replication, comprising a polynucleotide molecule where one or more polynucleotide molecule has been linked in a functionally operative manner, i.e. operably linked.

[0298] As used herein, the term “vector” means any recombinant polynucleotide construct that may be used for the purpose of transformation, i.e. the introduction of heterologous DNA into a host cell. Vectors used for plant transformation may include, for example, plasmids, cosmids, YACs (yeast artificial chromosomes), BACs (bacterial artificial chromosomes) or any other suitable cloning system, as well as fragments of DNA therefrom. Thus when the term “vector” or “expression vector” is used, all of the foregoing types of vectors, as well as nucleic acid sequences isolated therefrom, are included. It is contemplated that utilization of cloning systems with large insert capacities will allow introduction of large DNA sequences comprising more than one selected gene. In accordance with the invention, this could be used to introduce various desaturase encoding nucleic acids. Introduction of such sequences may be facilitated by use of bacterial or yeast artificial chromosomes (BACs or YACs, respectively), or even plant artificial chromosomes. For example, the use of BACs for Agrobacterium-mediated transformation was disclosed by Hamilton et al. (1996).

[0299] Particularly useful for transformation are expression cassettes that have been isolated from such vectors. DNA segments used for transforming plant cells will, of course, generally comprise the cDNA, gene or genes which one desires to introduce into and have expressed in the host cells. These DNA segments can further include structures such as promoters, enhancers, polylinkers, or even regulatory genes as desired. The DNA segment or gene chosen for cellular introduction will often encode a protein that will be expressed in the resultant recombinant cells resulting in a screenable or selectable trait and/or that will impart an improved phenotype to the resulting transgenic plant. However, this may not always be the case, and the present invention also encompasses transgenic plants incorporating non-expressed transgenes.

[0300] Methods and compositions for the construction of expression vectors, when taken in light of the teachings provided herein, for expression of desaturase enzymes will be apparent to one of ordinary skill in the art. Expression vectors, as described herein, are DNA or RNA molecules engineered for controlled expression of a desired polynucleotide, e.g., the Δ15-desaturase encoding polynucleotide. Examples of vectors include plasmids, bacteriophages, cosmids or viruses. Shuttle vectors, e.g. (Wolk et al. 1984; Bustos et al., 1991) are also contemplated in accordance with the present invention. Reviews of vectors and methods of preparing and using them can be found in Sambrook et al. (1989) and Goeddel (1990). Sequence elements capable of effecting expression of a polynucleotide include promoters, enhancer elements, upstream activating sequences, transcription termination signals and polyadenylation sites.

[0301] The constructs of the present invention may be any commercially-available expression vector, including the pYES2.1 or a double Ti plasmid border DNA constructs. Such Ti plasmid constructs have the right border (RB or AGRtu.RB) and left border (LB or AGRtu.LB) regions of the Ti plasmid isolated from Agrobacterium tumefaciens comprising a T-DNA, that along with transfer molecules provided by the Agrobacterium cells, permit the integration of the T-DNA into the genome of a plant cell (see for example U.S. Pat. No. 6,603,061, herein incorporated by reference in its entirety). The constructs may also comprise the plasmid backbone DNA segments that provide replication function and antibiotic selection in bacterial cells, for example, an Escherichia coli origin of replication such as ori322, a broad host range origin of replication such as oriV or oriRi, and a coding region for a selectable marker such as Spec/Strp that encodes for Tn7 aminoglycoside adenyltransferase (aadA) conferring resistance to spectinomycin or streptomycin, or a gentamicin (Gm, Gent) selectable marker gene. For plant transformation, the host bacterial strain is often Agrobacterium tumefaciens ABI, C58, or LBA4404, however, other strains known to those skilled in the art of plant transformation can function in the present invention.

[0302] Methods are known in the art for assembling and introducing constructs into a cell in such a manner that the transcribable polynucleotide molecule is transcribed into a functional mRNA molecule that is translated and expressed as a protein product. For the practice of the present invention, conventional compositions and methods for preparing and using constructs and host cells are well known to one skilled in the art, see for example, Molecular Cloning: A Laboratory Manual, 3rd edition Volumes 1, 2, and 3 (2000) J. F. Sambrook, D. W. Russell, and N. Irwin, Cold Spring Harbor Laboratory Press. Methods for making recombinant vectors particularly suited to plant transformation include, without limitation, those described in U.S. Pat. Nos. 4,971,908, 4,940,835, 4,769,061 and 4,757,011, all of which are herein incorporated by reference in their entireties.

[0303] Thus, one embodiment of the present invention is a construct comprising a regulatory element operably linked to a transcribable polynucleotide molecule as provided in SEQ ID NO: 332 through SEQ ID NO: 662 so as to modulate transcription of said transcribable polynucleotide molecule at a desired level or in a desired tissue or developmental pattern upon introduction of said construct into a plant cell. Modifications of the nucleotide sequences disclosed herein that maintain the functions contemplated herein are within the scope of this invention. Such modifications may include insertions, substitutions and deletions, and specifically substitutions which reflect the degeneracy of the genetic code.

[0304] As an example, a vector appropriate for expression of a Δ15-desaturase in transgenic plants can comprise a seed-specific promoter sequence derived from helianthinin, napin, or glycinin operably linked to the Δ15-desaturase coding region and further operably linked to a seed storage protein termination signal or the nopaline synthase termination signal. As a still further example, a vector for use in expression of Δ15-desaturase in plants can comprise a constitutive promoter or a tissue specific promoter operably linked to the Δ15-desaturase coding region and further operably linked to a constitutive or tissue specific terminator or the nopaline synthase termination signal.

[0305] In certain embodiments, the expression cassettes may include a cassette that provides for Δ6- and/or Δ15-desaturase activity, particularly in a host cell that produces or can take up LA or ALA, respectively. The host ALA production can be removed, reduced and/or inhibited by inhibiting the activity of the endogenous Δ15-desaturase. This can be accomplished by standard selection, by providing an expression cassette for an antisense Δ15-desaturase, by disrupting a target Δ15-desaturase gene through insertion, deletion, substitution of part or all of the target gene, or by adding an inhibitor of Δ15-desaturase. Production of omega-6 type unsaturated fatty acids, such as LA, is favored in a host organism that is incapable of producing ALA. Similarly, production of LA or ALA is favored in a microorganism or animal having Δ6-desaturase activity by providing an expression cassette for an antisense Δ6 transcript, by disrupting a Δ6-desaturase gene, or by use of a Δ6-desaturase inhibitor.

[0306] Polynucleotides encoding desired desaturases can be identified in a variety of ways. As an example, a source of the desired desaturase, for example genomic or cDNA libraries, is screened with detectable enzymatically- or chemically-synthesized probes, which can be made from DNA, RNA, or non-naturally occurring nucleotides, or mixtures thereof. Probes may be enzymatically synthesized from polynucleotides of known desaturases for normal or reduced-stringency hybridization methods. Oligonucleotide probes also can be used to screen sources and can be based on sequences of known desaturases, including sequences conserved among known desaturases, or on peptide sequences obtained from the desired purified protein. Oligonucleotide probes based on amino acid sequences can be degenerate to encompass the degeneracy of the genetic code, or can be biased in favor of the preferred codons of the source organism. Oligonucleotides also can be used as primers for PCR from reverse transcribed mRNA from a known or suspected source; the PCR product can be the full length cDNA or can be used to generate a probe to obtain the desired full length cDNA. Alternatively, a desired protein can be entirely sequenced and total synthesis of a DNA encoding that polypeptide performed.

[0307] Some or all of the coding sequence for a polypeptide having desaturase activity may be from a natural source. In some situations, however, it is desirable to modify all or a portion of the codons, for example, to enhance expression, by employing host preferred codons. Host preferred codons can be determined from the codons of highest frequency in the proteins expressed in the largest amount in a particular host species of interest. Thus, the coding sequence for a polypeptide having desaturase activity can be synthesized in whole or in part. All or portions of the DNA also can be synthesized to remove any destabilizing sequences or regions of secondary structure which would be present in the transcribed mRNA. All or portions of the DNA also can be synthesized to alter the base composition to one more preferable in the desired host cell. Methods for synthesizing sequences and bringing sequences together are well established in the literature. In vitro mutagenesis and selection, site-directed mutagenesis, or other means can be employed to obtain mutations of naturally occurring desaturase genes to produce a polypeptide having desaturase activity in vivo with more desirable physical and kinetic parameters for function in the host cell, such as a longer half-life or a higher rate of production of a desired polyunsaturated fatty acid.

[0308] The choice of any additional elements used in conjunction with the desaturase coding sequences will often depend on the purpose of the transformation. One of the major purposes of transformation of crop plants is to add commercially desirable, agronomically important traits to the plant. As PUFAs are known to confer many beneficial effects on health, concomitant increases in SDA production may also be beneficial and could be achieved by expression of fungal Δ15-desaturase. Such increasing of SDA may, in certain embodiments of the invention, comprise expression of Δ6 and/or Δ12 desaturase, including fungal or plant Δ6 and/or Δ12 desaturases.

### Transformation

[0309] The term “transformation” refers to the introduction of nucleic acid into a recipient host. The term “host” refers to bacteria cells, fungi, animals and animal cells, plants and plant cells, or any plant parts or tissues including protoplasts, calli, roots, tubers, seeds, stems, leaves, seedlings, embryos, and pollen. As used herein, the term “transformed” refers to a cell, tissue, organ, or organism into which has been introduced a foreign polynucleotide molecule, such as a construct. The introduced polynucleotide molecule may be integrated into the genomic DNA of the recipient cell, tissue, organ, or organism such that the introduced polynucleotide molecule is inherited by subsequent progeny. A “transgenic” or “transformed” cell or organism also includes progeny of the cell or organism and progeny produced from a breeding program employing such a transgenic plant as a parent in a cross and exhibiting an altered phenotype resulting from the presence of a foreign polynucleotide molecule. The term “transgenic” refers to an animal, plant, or other organism containing one or more heterologous nucleic acid sequences.

[0310] Technology for introduction of DNA into cells is well known to those of skill in the art. The method generally comprises the steps of selecting a suitable host cell, transforming the host cell with a recombinant vector, and obtaining the transformed host cell. Expression in a host cell can be accomplished in a transient or stable fashion. Transient expression can occur from introduced constructs that contain expression signals functional in the host cell, but which constructs do not replicate and rarely integrate in the host cell, or where the host cell is not proliferating. Transient expression also can be accomplished by inducing the activity of a regulatable promoter operably linked to the gene of interest, although such inducible systems frequently exhibit a low basal level of expression. Stable expression can be achieved by introduction of a construct that can integrate into the host genome or that autonomously replicates in the host cell. Stable expression of the gene of interest can be selected for through the use of a selectable marker located on or transfected with the expression construct, followed by selection for cells expressing the marker. When stable expression results from integration, integration of constructs can occur randomly within the host genome or can be targeted through the use of constructs containing regions of homology with the host genome sufficient to target recombination with the host locus. Where constructs are targeted to an endogenous locus, all or some of the transcriptional and translational regulatory regions can be provided by the endogenous locus.

[0311] When increased expression of the desaturase polypeptide in the source organism is desired, several methods can be employed. Additional genes encoding the desaturase polypeptide can be introduced into the host organism. Expression from the native desaturase locus also can be increased through homologous recombination, for example by inserting a stronger promoter into the host genome to cause increased expression, by removing destabilizing sequences from either the mRNA or the encoded protein by deleting that information from the host genome, or by adding stabilizing sequences to the mRNA (U.S. Pat. No. 4,910,141, herein incorporated by reference in its entirety).

[0312] It is contemplated that more than one polynucleotide encoding a desaturase or a polynucleotide encoding more than one desaturase may be introduced and propagated in a host cell through the use of episomal or integrated expression vectors. Where two or more genes are expressed from separate replicating vectors, it is desirable that each vector has a different means of replication. Each introduced construct, whether integrated or not, should have a different means of selection. Judicious choices of regulatory regions, selection means and method of propagation of the introduced construct can be experimentally determined so that all introduced polynucleotides are expressed at the necessary levels to provide for synthesis of the desired products.

[0313] Of particular interest is the Δ15-desaturase-mediated production of PUFAs in eukaryotic host cells. Eukaryotic cells include plant cells, such as those from oil-producing crop plants, and other cells amenable to genetic manipulation, including fungal cells. The cells may be cultured or formed as part or all of a host organism including a plant. In a preferred embodiment, the host is a plant cell that produces and/or can assimilate exogenously supplied substrate(s) for a Δ15-desaturase, and preferably produces large amounts of one or more of the substrates.

[0314] The transformed host cell is grown under appropriate conditions adapted for a desired end result. For host cells grown in culture, the conditions are typically optimized to produce the greatest or most economical yield of PUFAs, which relates to the selected desaturase activity. Media conditions that may be optimized include: carbon source, nitrogen source, addition of substrate, final concentration of added substrate, form of substrate added, aerobic or anaerobic growth, growth temperature, inducing agent, induction temperature, growth phase at induction, growth phase at harvest, pH, density, and maintenance of selection.

### Transgenic Plants

[0315] The present invention further provides a method for providing transgenic plants with an increased content of ALA and/or SDA. This method includes, for example, introducing DNA encoding Δ15-desaturase into plant cells that lack or have low levels of ALA or SDA but contain LA, and regenerating plants with increased ALA and/or SDA content from the transgenic cells. In certain embodiments of the invention, a DNA encoding a Δ6- and/or Δ12-desaturase may also be introduced into the plant cells. Such plants may or may not also have endogenous Δ6- and/or Δ12-desaturase activity. In certain embodiments, modified commercially grown crop plants are contemplated as the transgenic organism, including, but not limited to, Arabidopsis thaliana, canola, soy, soybean, rapeseed, sunflower, cotton, cocoa, peanut, safflower, coconut, flax, oil palm, oilseed Brassica napus, corn, jojoba, Chinese tallow tree, tobacco, fruit plants, citrus plants or plants producing nuts and berries.

[0316] Methods for transforming dicotyledons, primarily by use of Agrobacterium tumefaciens and obtaining transgenic plants have been published for cotton (U.S. Pat. No. 5,004,863; U.S. Pat. No. 5,159,135; U.S. Pat. No. 5,518,908, all of which are herein incorporated by reference); soybean (U.S. Pat. No. 5,569,834; U.S. Pat. No. 5,416,011, all of which are herein incorporated by reference; McCabe, et al., 1988; Christou et al., 1988). Brassica (U.S. Pat. No. 5,463,174, herein incorporated by reference); peanut (Cheng et al., 1996, McKently et al., 1995); papaya; and pea (Grant et al., 1995).

[0317] Transformation of monocotyledons using electroporation, particle bombardment and Agrobacterium have also been reported. Transformation and plant regeneration have been achieved in asparagus (Bytebier et al., 1987); barley (Wan and Lemaux, 1994); maize (Rhodes et al., 1988; Gordon-Kamm et al., 1990; Fromm et al., 1990; Koziel et al., 1993; Armstrong et al., 1995; Toriyama et al., 1986; Part et al., 1996; Abedinia et al., 1997; Zhang and Wu, 1988; Zhang et al., 1988; Battraw and Hall, 1992; Christou et al., 1991); oat (Somers et al., 1992); orchard grass (Horn et al., 1988); rye (De la Pena et al., 1987); sugarcane (Bower and Birch, 1992); tall fescue (Wang et al., 1992) and wheat (Vasil et al., 1992; U.S. Pat. No. 5,631,152, herein incorporated by reference in its entirety).

[0318] The transformed plants are analyzed for the presence of the genes of interest and the expression level and/or profile conferred by the regulatory elements of the present invention. Those of skill in the art are aware of the numerous methods available for the analysis of transformed plants. For example, methods for plant analysis include, but are not limited to Southern blots or northern blots, PCR-based approaches, biochemical analyses, phenotypic screening methods, field evaluations, and immunodiagnostic assays. By employing a selectable or screenable marker protein, one can provide or enhance the ability to identify transformants. “Marker genes” are genes that impart a distinct phenotype to cells expressing the marker protein and thus allow such transformed cells to be distinguished from cells that do not have the marker. Such genes may encode either a selectable or screenable marker, depending on whether the marker confers a trait which one can “select” for by chemical means, i.e., through the use of a selective agent (e.g., a herbicide, antibiotic, or the like), or whether it is simply a trait that one can identify through observation or testing, i.e., by “screening” (e.g., the green fluorescent protein). Of course, many examples of suitable marker proteins are known to the art and can be employed in the practice of the invention.

[0319] The seeds of the plants of this invention can be harvested from fertile transgenic plants and be used to grow progeny generations of transformed plants of this invention, including hybrid plant lines comprising the construct of this invention and expressing a gene of agronomic interest. The present invention also provides for parts of the plants of the present invention. Plant parts, without limitation, include seed, endosperm, ovule and pollen. In a particularly preferred embodiment of the present invention, the plant part is a seed. The invention also includes and provides transformed plant cells which comprise a nucleic acid molecule of the present invention.

[0320] The transgenic plant may pass along the transformed nucleic acid sequence to its progeny. The transgenic plant is preferably homozygous for the transformed nucleic acid sequence and transmits that sequence to all of its offspring upon as a result of sexual reproduction. Progeny may be grown from seeds produced by the transgenic plant. These additional plants may then be self-pollinated to generate a true breeding line of plants. The progeny from these plants are evaluated, among other things, for gene expression. The gene expression may be detected by several common methods such as western blotting, northern blotting, immunoprecipitation, and ELISA.

### Conventional Breeding

[0321] In addition to direct transformation of a particular plant genotype with a construct prepared according to the current invention, transgenic plants may be made by crossing a plant having a selected DNA of the invention to a second plant lacking the DNA. Plant breeding techniques may also be used to introduce multiple desaturases, for example Δ6, Δ12, and/or Δ15-desaturase(s) into a single plant. By creating plants homozygous for a Δ15-desaturase activity and/or other desaturase activity (e.g., Δ6- and/or Δ12-desaturase activity), beneficial metabolites can be increased in the plant.

[0322] As set forth above, a selected desaturase gene can be introduced into a particular plant variety by crossing, without the need for ever directly transforming a plant of that given variety. Therefore, the current invention not only encompasses a plant directly transformed or regenerated from cells which have been transformed in accordance with the current invention, but also the progeny of such plants. As used herein the term “progeny” denotes the offspring of any generation of a parent plant prepared in accordance with the instant invention, wherein the progeny comprises a selected DNA construct prepared in accordance with the invention. “Crossing” a plant to provide a plant line having one or more added transgenes or alleles relative to a starting plant line, as disclosed herein, is defined as the techniques that result in a particular sequence being introduced into a plant line by crossing a starting line with a donor plant line that comprises a transgene or allele of the invention. To achieve this one could, for example, perform the following steps: (a) plant seeds of the first (starting line) and second (donor plant line that comprises a desired transgene or allele) parent plants; (b) grow the seeds of the first and second parent plants into plants that bear flowers; (c) pollinate a flower from the first parent plant with pollen from the second parent plant; and (d) harvest seeds produced on the parent plant bearing the fertilized flower.

[0323] Backcrossing is herein defined as the process including the steps of: (a) crossing a plant of a first genotype containing a desired gene, DNA sequence or element to a plant of a second genotype lacking said desired gene, DNA sequence or element; (b) selecting one or more progeny plant containing the desired gene, DNA sequence or element; (c) crossing the progeny plant to a plant of the second genotype; and (d) repeating steps (b) and (c) for the purpose of transferring a desired DNA sequence from a plant of a first genotype to a plant of a second genotype.

[0324] Introgression of a DNA element into a plant genotype is defined as the result of the process of backcross conversion. A plant genotype into which a DNA sequence has been introgressed may be referred to as a backcross converted genotype, line, inbred, or hybrid. Similarly a plant genotype lacking the desired DNA sequence may be referred to as an unconverted genotype, line, inbred, or hybrid.

### Other Uses of the Present Invention

[0325] The subject invention finds many applications. One use of the sequences provided by the invention is contemplated to be the alteration of plant phenotypes, e.g., oil composition, by genetic transformation with desaturase genes. In particular embodiments, the desaturase gene is an engineered Δ15-desaturase.

[0326] For dietary supplementation, the purified PUFAs, transformed plants or plant parts, or derivatives thereof, may be incorporated into cooking oils, fats or margarines formulated so that in normal use the recipient would receive the desired amount. The PUFAs may also be incorporated into edible compositions such as infant formulas, nutritional supplements or other food products, and may find use as anti-inflammatory or cholesterol lowering agents. The purified PUFAs, transformed plants or plant parts may also be incorporated into animal, particularly livestock, feed.

[0327] Having now generally described the invention, the same will be more readily understood through reference to the following examples which are provided by way of illustration, and are not intended to be limiting of the present invention, unless specified. Each periodical, patent, and other document or reference cited herein is herein incorporated by reference in its entirety.

[0328] The following examples are included to demonstrate preferred embodiments of the invention. It should be appreciated by those of skill in the art that the techniques disclosed in the examples that follow represent techniques discovered by the inventors to function well in the practice of the invention. However, those of skill in the art should, in light of the present disclosure, appreciate that many changes can be made in the specific embodiments that are disclosed and still obtain a like or similar result without departing from the spirit and scope of the invention.

### EXAMPLES

[0329] The following examples are included to illustrate embodiments of the invention. It should be appreciated by those of skill in the art that the techniques disclosed in the examples which follow represent techniques discovered by the inventor to function well in the practice of the invention. However, those of skill in the art should, in light of the present disclosure, appreciate that many changes can be made in the specific embodiments which are disclosed and still obtain a like or similar result without departing from the concept, spirit and scope of the invention. More specifically, it will be apparent that certain agents which are both chemically and physiologically related may be substituted for the agents described herein while the same or similar results would be achieved. All such similar substitutes and modifications apparent to those skilled in the art are deemed to be within the spirit, scope and concept of the invention as defined by the appended claims.

### Example 1

### Bioinformatics Analysis and Molecular Engineering of Delta-15 Desaturase Sequences

[0330] Sequence alignments of delta-15 desaturases from various sources, including Mortierella alpina, Neurospora crassa, Saccharomyces kluyveri, Aspergillis nidulans and Chlorella vulgaris, reveal regions of the molecules that comprise highly variable amino acid sequences in addition to more conserved regions. The regions of high diversity were selected for molecular engineering experiments for the purpose of generating molecules with novel characteristics, such as substrate preference and/or enzymatic activity. Using the Mortierella alpina delta-15 desaturase protein as a parent protein, changes were designed in these highly variable regions to sample from the diversity observed in naturally occurring delta-15 desaturases. Additional conservative amino acid substitutions were included in the designs as well.

[0331] Polynucleotide sequences were engineered to correspond to the amino acid variants designed from the bioinformatics analysis. For some variants, generation of the polynucleotide sequences was executed using a novel Degenerate Oligonucleotide Tail (DOT) approach, disclosed in U.S. patent application Ser. No. 11/827,318, herein incorporated by reference in its entirety. Briefly, a pair of oligonucleotides were designed that to anneal to the plasmid template on the other side and adjacent to the targeted region, and were capable of serving as primers in a polymerase chain reaction. The oligonucleotides comprised a modification, such as 2′-O-methylribose, that is capable of terminating extension by a polymerase, thereby leaving the PCR product with single-stranded tails. The tails, located 5′ of the terminating base, were designed such that they may anneal to each other. To introduce variation into the targeted region, the tails included degenerate base positions. The primers that introduced the desired diversity into the engineered delta-15 desaturase were designed and ordered from Operon Technologies, Inc. (Alameda, Calif.). Sets of DOT primers were used to introduce mutations into the delta-15 desaturase molecule by means of terminated PCR on the template (yeast-codon optimized sequence in a pYES2.1 vector).

[0332] For some cases, more than one iteration of the DOT method was employed to generate the engineered delta-15 desaturase molecular variants. Upon creation of variants in a single DOT region, the resultant molecules were used as templates for generation of variants in a second DOT region. Another option would be to select a set of molecules from one DOT region, combine them, or use them individually as templates for another DOT variation region. It is contemplated that many different combinations and iterations of the DOT method may be utilized to generate any number of molecular variant types.

[0333] Other variants were created as chimeric molecules via gene splicing. Other methods known in the art could be used to engineer the molecules of the present invention.

[0334] PCR was then performed according to methods well known in the art, with Pfu and Pfu Turbo polymerase mixtures using the following thermocycler gradient program:

TABLE 1
PCR Thermocycler Parameters for DOT method generation
of delta-15 desaturase engineered variants

| | |
|---|---|
| Temperature (° C.) | Time |

One Cycle

| | | |
|---|---|---|
| 95 | 5 | minutes |
| 50-65 | 3 | minutes |
| 72 | 12 | minutes |

30 Cycles

| | | |
|---|---|---|
| 95 | 45 | seconds |
| 50-65 | 45 | seconds |
| 72 | 12 | minutes |

Final Step

| | |
|---|---|
| 4 | hold |

[0335] Resulting PCR products were treated with DpnI to remove the parental template molecules, then were self-annealed, transformed into chemically competent E. coli Top10 (Invitrogen) and plated onto solid CircleGrow medium with ampicillin. The individual colonies were grown in liquid culture and the DNA was isolated by a standard miniprep procedure using methods well known in the art. The plasmid DNA was sequenced using the BigDye DNA sequencing kit and two primers (Gal1 and V5) to cover the whole sequence of the desaturase gene.

### Example 2

### Yeast Cell Transformation and Expression

[0336] The pYES2.1/V5-His clones comprising the engineered delta-15 desaturases were introduced into a host strain Saccharomyces cerevisiae INVSc1 (auxotrophic for uracil) (Invitrogen) using the PEG/Li Ac protocol as described in the Zymos EZ yeast transformation manual. Transformants were selected on plates made of SC minimal media minus uracil with 2% glucose. Colonies of transformants were used to inoculate 800 μl of SC minimal media minus uracil and 2% raffinose grown overnight at 30° C. For induction, stationary phase yeast cells were diluted in SC minimal media minus uracil supplemented with 2% galactose and 2% raffinose grown for 2 days at 15° C. or 16 hours at 30° C. When exogenous fatty acids were provided to the cultures, 0.005% (v/v) LA (Δ9,12-18:2) and 0.005% (v/v) GLA (Δ6,9,12-18:3) were added with the emulsifier 0.1% Tergitol. The cultures were grown for 2 days at 15° C. or 16 hours at 30° C., and subsequently harvested by centrifugation. Cell pellets were washed once with sterile water, to remove the media, and lyophilized to dryness. The host strain transformed with the vector containing the LacZ gene was used as a negative control in all experiments.

### Example 3

### Functional Yeast Cell Based Fatty Acid Desaturase Assay

[0337] To characterize the substrate selectivity and relative activity of fatty acid desaturase enzymes, a yeast (Saccharomyces cerevisiae) cell-based assay system was developed. Yeast is a suitable host system for studying desaturase enzymes as it is incapable of endogenously producing polyunsaturated fatty acids, as it only naturally expresses a delta-9 desaturase. The fatty acid compositional profile of yeast harboring an introduced desaturase gene was obtained through fatty acid methyl ester gas chromatographic separation coupled to flame ionization detection.

[0338] Lipids were extracted from lyophilized yeast pellets and converted to fatty acid methyl esters (FAMEs) by adding 0.05 mL toluene containing an internal standard and 0.167 mL of 5% (v/v) sulfuric acid in methanol and heating to 90° C. for 90 minutes. The FAMEs were extracted by addition of 0.3 mL 10% (w/v) NaCl and 0.3 mL of heptane. The autosampler needle penetration depth was set to sample from the heptane layer containing the FAMEs and used directly for gas chromatography (GC). The FAMEs were identified on a Hewlett-Packard 6890 II Plus GC (Hewlett-Packard, Palo Alto, Calif.) equipped with a flame-ionization detector and a capillary column (omegawax 250; 15 m×0.25 mm i.d.×0.25 μm; Supelco, Bellefonte, Pa.). A 30:1 split ratio was used for injections. The injector was maintained at 250° C. and the flame ionization detector was maintained at 270° C. The column temperature was maintained at 190° C. for 0.1 min following injection, increased to 240° C. at 50° C./min, and held at 240° C. for 0.75 min.

[0339] The results shown in Table 2 demonstrate that the native M. alpina delta-15 desaturase exhibits Δ15 desaturase activity in a yeast expression system. The substrate preference was deduced from a yeast induction assay, whereby yeast cultures induced to express recombinant desaturase are fed equal amounts of LA and GLA. Substrate preference for GLA over LA is calculated by measuring the amounts of their respective products, SDA and ALA, and using the following formula:

Preference Ratio=(SDA/(SDA+GLA))/(ALA/(LA+ALA),

[0340] where SDA is stearodonic acid,

[0341] GLA is gamma linolenic acid,

[0342] ALA is alpha linolenic acid,

[0343] and LA is linoleic acid.

[0344] The yeast incorporated these fatty acids into their membranes where they became substrates for the recombinant desaturase. The products of LA and GLA Δ15 desaturation are ALA and SDA, respectively. Four individual MaD15D colonies were selected and provided LA and GLA, with a substrate selectivity for GLA that is 1.2 fold higher than for LA. The negative control was a pYES2.1 vector comprising a LacZ insert.

TABLE 2
Delta 15 desaturase activity of M. alpina in a yeast expression system.

| | FA In | | | | | Substrate |
|---|---|---|---|---|---|---|
| Construct | Medium | LA | GLA | ALA | SDA | Preference* |
| neg control | — | 0 | 0 | 0 | 0 | NA |
| neg control | — | 0 | 0 | 0 | 0 | NA |
| neg control | LA + GLA | 7.53 | 10.84 | 0 | 0 | NA |
| neg control | LA + GLA | 8.97 | 8.70 | 0 | 0 | NA |
| neg control | LA + GLA | 8.04 | 7.67 | 0 | 0 | NA |
| neg control | LA + GLA | 6.97 | 7.34 | 0 | 0 | NA |
| MaD15D | — | 0 | 0 | 0 | 0 | NA |
| MaD15D | — | 0 | 0 | 0 | 0 | NA |
| MaD15D | LA + GLA | 5.94 | 5.21 | 4.50 | 6.21 | 1.26 |
| MaD15D | LA + GLA | 5.46 | 4.17 | 4.78 | 6.08 | 1.27 |
| MaD15D | LA + GLA | 5.88 | 3.96 | 5.16 | 5.81 | 1.27 |
| MaD15D | LA + GLA | 5.27 | 3.93 | 4.82 | 5.87 | 1.26 |

[0345] Engineered desaturases of the present invention that were designed and expressed according to the methods described above were tested in a similar manner in this cell-based yeast expression system. SEQ ID NO: 1 through SEQ ID NO: 331 are engineered delta-15 desaturases that exhibited assay activity greater than that seen from the native M. alpina delta-15 desaturase in the cell-based yeast expression system. SEQ ID NO: 332 through SEQ ID NO: 662 are the corresponding delta-15 desaturase nucleotide molecules that encoded the engineered proteins that exhibited assay activity greater than that seen from the native M. alpina delta-15 desaturase in the cell-based yeast expression system. SEQ ID NO: 663 through SEQ ID NO: 722 are engineered delta-15 desaturases that exhibited assay comparable to that of the native M. alpina delta-15 desaturase in the cell-based yeast expression system. SEQ ID NO: 783 through SEQ ID NO: 842 are the corresponding delta-15 desaturase nucleotide molecules that encode the engineered proteins that exhibited assay comparable to that of the native M. alpina delta-15 desaturase in the cell-based yeast expression system. SEQ ID NO: 843 through SEQ ID NO: 902 are the corresponding delta-15 desaturase nucleotide molecules that encode the engineered proteins that were not active in the cell-based yeast expression system.

### Example 4

### Soybean Somatic Embryo Transformation

[0346] Evaluation of oil composition in transgenically altered soy may be achieved using a soy somatic embryogenesis system. This system uses the ability to generate somatic embryos through the use of embryogenic cell cultures derived from the cotyledons of immature soy embryos. As practiced, transformation of said embryos occurs by introduction of the effector gene or genes through particle bombardment. Transformed embryos are selected by introducing a gene for NptII on the plasmid containing the effector gene(s) and by using paromomycin in the growth medium. Transgenic embryos are matured on a maturation medium, grown for a period of time, harvested, frozen in liquid nitrogen and analyzed for oil composition using methods known in the art.

### Example 5

### Transformation of Plants with an Engineered Delta-15 Desaturase Gene

[0347] This example describes the transformation and regeneration of transgenic Arabidopsis thaliana plants expressing a heterologous Δ15-desaturase coding sequence. Transformation vectors comprising an engineered delta-15 desaturase coding sequence are introduced into Agrobacterium tumefaciens strain ABI using methodology well known in the art. Transgenic A. thaliana plants are obtained as described by Bent et al. (1994) or Bechtold et al. (1993). Briefly, cultures of Agrobacterium with the vectors comprising the engineered desaturase coding sequences, along with a selectable marker such as CP4, are grown overnight in LB (10% bacto-tryptone, 5% yeast extract, and 10% NaCl with kanamycin (75 mg/L), chloramphenicol (25 mg/L), and spectinomycin (100 mg/L)). The bacterial culture is centrifuged and resuspended in 5% sucrose+0.05% Silwet-77. The aerial portion of whole A. thaliana plants (−5-7 weeks of age) are immersed in the resulting solution for 2-3 seconds. The excess solution is removed by blotting the plants on paper towels. The dipped plants are placed on their side in a covered flat and transferred to a growth chamber at 19° C. After 16 to 24 hours the dome is removed and the plants are set upright. When plants reached maturity, water is withheld for 2-7 days prior to seed harvest. Harvested seed is passed through a stainless steel mesh screen. To select transformants, seed is plated on agar medium containing 50 mg/L glyphosate. Green seedlings are rescued and transplanted into 4″ pots and grown under the conditions described above. Leaves were harvested for fatty acid analysis when the rosette was at the 4-leaf stage. After lyophilization, leaf fatty acids were analyzed as described above.

[0348] In order to assess the functional specificity of a delta-15 desaturase clone to direct production of ALA in seeds, the coding region is cloned into a seed-specific expression vector in which a seed-specific promoter drives expression of the transgene. The resulting construct is transformed into A. thaliana and seeds of transformed T2 plants are analyzed for fatty acid composition.

### Example 6

### Activity of an Engineered Delta 15-Desaturase in Combination with Delta 6- and Delta 12-Desaturases

[0349] The activity of the engineered Δ15-desaturase, in combination other desaturase genes, such as Δ6- and Δ12-desaturases, from either a native or engineered source, may be evaluated by transforming a plant with a construct comprising the engineered delta-15 desaturase coding sequence with additional desaturase genes, for example a delta-6 desaturase and/or a delta-12 desaturase, under the control of a seed-specific promoter, such as the napin promoter. Fatty acid content of 10-seed pools from individual R0 plants may be determined using methods known in the art. The levels of stearic acid (18:0) (SA), oleic acid (18:1) (OA), LA, ALA, SDA and GLA are then evaluated.

### Example 7

### EPA Equivalence

[0350] One measure of seed oil quality for health value is EPA equivalence (James et al., Metabolism of stearidonic acid in human subjects: comparison with the metabolism of other n-3 fatty acids, Am J Clin Nutr 77:1140-5, 2003 and U.S. Pat. No. 7,163,960, herein incorporated by reference in its entirety). The value reflects the metabolic conversion rate to EPA. This is calculated by adding the % ALA divided by 14 and the % SDA divided by 4. The oil compositions obtained from seeds expressing the desaturases of the present invention may be determined and the EPA equivalence calculated.

An example of the analysis is given by comparison of conventional canola oil relative to an example of a typical high SDA oil composition of 10% ALA and 15% SDA. Canola oil from conventional varieties has approximately 12% ALA and 0% SDA and thus has an EPA equivalence of 12/14+0/4=0.8. In contrast, the high SDA oil composition example has an EPA equivalence of 10/14+15/4=4.4. Values are by wt %, not on a serving basis. The vast difference shows the importance of producing SDA in canola oil.

### REFERENCES

[0351] Abedinia et al., Aust. J. Plant Physiol. 24:133-141 (1997)
[0352] Armstrong et al., Crop Science 35:550-557 (1995)
[0353] Arondel et al., Science 258(5086):1353-1355 (1992)
[0354] Ausubel et al., Current protocols in molecular biology. John Wiley and Sons Inc., New York, N.Y. (1987)
[0355] Baggio et al., Nephron 91:3 (2002)
[0356] Bairati et al., Circulation 85:950-956 (1992)
[0357] Battraw and Hall, Plant Sci. 86:191-202 (1992)
[0358] Bower and Birch, Plant J. 2:409 (1992)
[0359] Bray et al., Planta 172(3): 364-370 (2004)
[0360] Bustos et al., EMBO J. 10: 1469-1479 (1991)
[0361] Bytebier et al., Proc. Natl. Acad. Sci. (USA) 84:5354 (1987)
[0362] Cheng et al., Plant Cell Rep. 15:653-657 (1996)
[0363] Chou and Fasman, Adv Enzymol Relat Areas Mol Biol 47:45-148 (1978)
[0364] Christou et al., BioTechnology 9:957 (1991)
[0365] Christou et al., Plant Physiol. 87:671-674 (1988)
[0366] Cleland and James, J Rheumatol 27(10):2305-7 (2000)
[0367] De Deckerer, Eur. J. Clin. Nutr., 52:749 (1998)
[0368] De la Pena et al., Nature 325:274 (1987)
[0369] Diaz et al., J. Biol. Chem., Vol. 277, Issue 50, 48099-48106 (2002)
[0370] Doyle et al., J Biol Chem 261: 9228-9238 (1986)
[0371] Fromm et al., BioTechnology 8:833 (1990)
[0372] Goeddel, Methods Enzymol. 185:3-7 (1990)
[0373] Gordon-Kamm et al., Plant Cell 2:603-618 (1990)
[0374] Grant et al., Plant Cell Rep. 15:254-258 (1995)
[0375] Hamilton et al., Proc Natl Acad Sci USA 93(18):9975-9979 (1996)
[0376] Haymes et al., Nucleic Acid Hybridization, A Practical Approach, IRL Press, Washington, D.C. (1985)
[0377] Horn et al., Plant Cell Rep. 7:469 (1988)
[0378] James et al., Am J Clin Nutr 77:1140-5 (2003)
[0379] Knipple et al., Genetics 162:1737-1752 (2002)
[0380] Knutzon et al., Proc. Natl. Acad. Sci U.S.A. 89: 2624-2628 (1992)
[0381] Koziel et al., BioTechnology 11:194 (1993)
[0382] Kridl et al., Seed Sci. Res. 1: 209 (1991)
[0383] Kyte and Doolittle. J Mol Biol 157(1):105-132 (1982)
[0384] Lam and Chua, Science 248: 471 (1991)
[0385] Lindstrom et al., Developmental Genetics 11: 160 (1990)
[0386] Mantzioris et al., Am J Clin Nutr. 59(6): 1304-9 (1994)
[0387] McCabe et al., Biotechnology, 6: 923 (1988)
[0388] McKently et al., Plant Cell Rep. 14:699-703 (1995)
[0389] Meesapyodsuk et al., Biochemistry, 39(39), 11948-11954 (2000)
[0390] Nagakura et al., Eur Respir J 16: 861-865 (2000)
[0391] Naylor et al., Nature 405, 1017-1024 (2000)
[0392] Needleman and Wunsch, J Mol Biol 48(3):443-53 (1970)
[0393] Part et al., Plant Mol. Biol. 32:1135-1148 (1996)
[0394] Pearson and Lipman, Science 227(4693):1435-1441 (1985)
[0395] Pesole et al., Biotechniques 25(1):112-7, 120-3 (1998)
[0396] Reed et al., Plant Physiol 122(3): 715-720 (2000)
[0397] Rhodes et al., Science 240:204 (1988)
[0398] Sambrook and Russel, Molecular Cloning, A Laboratory Manual, Editions 1-7, Cold Spring Harbor Press, Cold Spring Harbor, N.Y. (1989-2007)
[0399] Sasata et al., J Biol Chem 279(38): 39296-39302 (2004)
[0400] Simopoulos, Can J Physiol Pharmacol. 75(3):234-9 (1997)
[0401] Smith and Waterman, J Mol Biol 147(1):195-7 (1981)
[0402] Somers et al., BioTechnology 10:1589 (1992)
[0403] Søyland et al., Eur J Clin Invest. 24(4):236-42 (1994)
[0404] Sperling et al., Prostaglandins, Leukotrienes and Essential Fatty Acids 68(2):73-9 (2003)
[0405] Tierney et al., Planta 172:356 (1987)
[0406] Toriyama et al., Theor Appl. Genet. 205:34 (1986) Vasil et al., BioTechnology 10:667 (1992)
[0407] Vodkin et al., Cell, 34: 1023 (1983)
[0408] Wan and Lemaux, Plant Physiol 104:37 (1994)
[0409] Wang et al., BioTechnology 10:691 (1992)
[0410] Wolk, et al., Proc Natl Acad Sci USA 81(5): 1561-1565 (1984)
[0411] Zhang and Wu, Theor. Appl. Genet. 76:835 (1988)
[0412] Zhang et al., Plant Cell Rep. 7:379 (1988)

We claim:

1. An engineered fatty acid desaturase molecule, wherein said desaturase molecule:
a. exhibits a substrate preference for Gamma Linolenic Acid (GLA) over Linoleic Acid (LA) of at least 1.75× and as calculated by the formula (SDA/(SDA+GLA))/(ALA/(LA+ALA), where SDA is stearodonic acid, GLA is gamma linolenic acid, ALA is alpha linolenic acid, and LA is linoleic acid; or
b. exhibits a total conversion rate of GLA to SDA of at least 40%; or
c. when expressed in a transgenic plant, causes the transgenic plant to produce more omega-3 fatty acid than non-transgenic plants; or
d. when co-expressed with a delta-6 fatty acid desaturase in a transgenic plant, causes the transgenic plant to accumulate, as compared to a non-transgenic plant, a condition selected from the group consisting of: more SDA than ALA, and greater conversion of GLA to SDA than LA to ALA.

2. The desaturase molecule of claim 1, further defined as a molecule that desaturates a fatty acid molecule at carbon 15.

3. The desaturase molecule of claim 1, wherein said molecule has 80% similarity to a fungal desaturase.

4. The desaturase molecule of claim 1, wherein said molecule comprises amino acid sequence variants generated from a parental fungal desaturase.

5. The desaturase molecule of claim 1, wherein said desaturase is identified from a genus selected from the group consisting of: Mortierella, Neurospora, Aspergillus, Saccharomyces, Botrytis, Chlorella.

6. The desaturase molecule of claim 1, wherein the molecule has a sequence selected from the group consisting of SEQ ID NO: 1 through SEQ ID NO: 331.

7. The desaturase molecule of claim 1, wherein the molecule exhibits a percent sequence identity of greater than about 90% identity with a molecule selected from the group consisting of: SEQ ID NO: 1 through SEQ ID NO: 331.

8. The desaturase molecule of claim 1, wherein the molecule comprises a fragment of SEQ ID NO: 1 through SEQ ID NO: 331.

9. A polynucleotide encoding the desaturase molecule of claim 1.

10. The polynucleotide of claim 9, wherein the polynucleotide has a sequence selected from the group consisting of SEQ ID NO: 332 through SEQ ID NO: 662.

11. The polynucleotide of claim 9 that, when under the control of a regulatory element, is capable of expression in a plant.

12. The polynucleotide of claim 9, or any complement thereof, or any fragment thereof, comprising a nucleic acid sequence that exhibits a substantial percent sequence identity of greater than about 90% to a sequence selected from the group consisting of SEQ ID NO: 332 through SEQ ID NO: 662.

13. A construct comprising the polynucleotide of claim 9.

14. The construct of claim 13, further comprising a second polynucleotide that is transcribable.

15. The construct of claim 14, wherein the second transcribable polynucleotide molecule is selected from the group consisting of: a non-coding regulatory element, a selectable marker, a gene encoding a second desaturase, and a gene of agronomic interest.

16. The construct of claim 15, wherein the gene of agronomic interest is a gene controlling the phenotype of a trait selected from the group consisting of: herbicide tolerance, insect control, modified yield, fungal disease resistance, virus resistance, nematode resistance, bacterial disease resistance, plant growth and development, starch production, modified oils production, high oil production, modified fatty acid content, high protein production, fruit ripening, enhanced animal and human nutrition, biopolymers, environmental stress resistance, pharmaceutical peptides and secretable peptides, improved processing traits, improved digestibility, enzyme production, flavor, nitrogen fixation, hybrid seed production, fiber production, and biofuel production.

17. A host cell stably transformed with the construct of claim 15.

18. The host cell of claim 17, further defined as a plant cell.

19. A progeny of the host cell of claim 18, wherein said progeny has inherited the polynucleotide of said polynucleotide construct.

20. The plant cell of claim 18, wherein said plant cell is a cell of a plant selected from the group consisting of: Arabidopsis thaliana, Brassica napus, Brassica rapa, rapeseed, sunflower, safflower, canola, corn, soybean, cotton, flax, jojoba, Chinese tallow tree, tobacco, cocoa, peanut, fruit plants, citrus plants, plants producing nuts, plants producing seeds, and plants producing berries.

The application's sequence listing, which the Patent Office published only in electronic form, follows.

SEQUENCE LISTING (902 sequences)

SEQ ID NO: 1 - protein, 403 aa, Artificial sequence
  Delta-15 Desaturase
MAPPHVVDEQVRRRIVVEDEIKSKKQFERNYVPMDFTIKEIRDAIPAHLFIRDTTKSILHVVKDLVTIAIVFYCATFIETLPSLALRVPAWITYWIIQGTVMVGPWILAHECGHGAFSDSKTINTIFGWVLHSALLVPYQAWAMSHSKHHKFTGTMAKDVVFIPATRSYKGLPALEKPAVEEEVSEQEHHHHEESIFAETPIYTLGALLFVLTFGWPLYLIVNFSGHEAPHWVNHFQTVAPLYEPHQRKNIFYSNCGIVAMGSILTYLSMVFSPLTVFMYYGIPYLGVNAWIVCITYLQHTDPKVPHFRDNEWNFQRGAACTIDRSFGTIVNHLHHHIGDSHQCHHMFSQMPFYNAVEATKYLKAKLGKYYIFDDTPIAKALYRNWRECKFVEDEGDVVFYKH

SEQ ID NO: 2 - protein, 403 aa, Artificial sequence
  Delta-15 Desaturase
MAPPHVVDEQVRRRIVVEDEIKSKKQFERNYVPMDFTIKEIRDAIPAHLFIRDTTKSILHVVKDLVTIAIVFYCATFIETLPSLALRVPAWITYWIIQGTVMVGPWILAHECGHGAFSDSKTINTIFGWVLHSALLVPYQAWAMSHSKHHKSTGTMTKDVVFIPATRSYKGLPALEKPAVEEEVSEQEHHHHEESIFAETPIYTLGALLFVLTFGWPLYLIVNFSGHEAPHWVNHFQTVAPLYEPHQRKNIFYSNCGIVAMGSILTYLSMVFSPLTVFMYYGIPYLGVNAWIVCITYLQHTDPKVPHFRDNEWNFQRGAACTIDRSFGTIVNHLHHHIGDSHQCHHMFSQMPFYNAVEATKYLKAKLGKYYIFDDTPIAKALYRNWRECKFVEDEGDVVFYKH

SEQ ID NO: 3 - protein, 403 aa, Artificial sequence
  Delta-15 Desaturase
MAPPHVVDEQVRRRIVVEDEIKSKKQFERNYVPMDFTIKEIRDAIPAHLFIRDTTKSILHVVKDLVTIAIVFYCATFIETLPSLALRVPAWITYWIIQGTVMVGPWILAHECGHGAFSKPKWINSIIGWVLHSALLVPYQAWAMSHSKHHKVTGSMTKDVVFIPATRSYKGLPALEKPAVEEEVSEQEHHHHEESIFAETPIYTLGALLFVLTFGWPLYLIVNFSGHEAPHWVNHFQTVAPLYEPHQRKNIFYSNCGIVAMGSILTYLSMVFSPLTVFMYYGIPYLGVNAWIVCITYLQHTDPKVPHFRDNEWNFQRGAACTIDRSFGTIVNHLHHHIGDSHQCHHMFSQMPFYNAVEATKYLKAKLGKYYIFDDTPIAKALYRNWRECKFVEDEGDVVFYKH

SEQ ID NO: 4 - protein, 403 aa, Artificial sequence
  Delta-15 Desaturase
MAPPHVVDEQVRRRIVVEDEIKSKKQFERNYVPMDFTIKEIRDAIPAHLFIRDTTKSILHVVKDLVTIAIVFYCATFIETLPSLALRVPAWITYWIIQGTVMVGPWILAHECGHGAFSKHRRFNTIIGWVLHSALLVPYQAWAMSHSKHHKVTGHMSKDLVFIPATRSYKGLPALEKPAVEEEVSEQEHHHHEESIFAETPIYTLGALLFVLTFGWPLYLIVNFSGHEAPHWVNHFQTVAPLYEPHQRKNIFYSNCGIVAMGSILTYLSMVFSPLTVFMYYGIPYLGVNAWIVCITYLQHTDPKVPHFRDNEWNFQRGAACTIDRSFGTIVNHLHHHIGDSHQCHHMFSQMPFYNAVEATKYLKAKLGKYYIFDDTPIAKALYRNWRECKFVEDEGDVVFYKH

SEQ ID NO: 5 - protein, 403 aa, Artificial sequence
  Delta-15 Desaturase
MAPPHVVDEQVRRRIVVEDEIKSKKQFERNYVPMDFTIKEIRDAIPAHLFIRDTTKSILHVVKDLVTIAIVFYCATFIETLPSLALRVPAWITYWIIQGTVMVGPWILAHECGHGAFSHYRRFNTILGWVLHSALLVPYQAWAMSHSKHHKCTGRMTKDVVFIPATRSYKGLPALEKPAVEEEVSEQEHHHHEESIFAETPIYTLGALLFVLTFGWPLYLIVNFSGHEAPHWVNHFQTVAPLYEPHQRKNIFYSNCGIVAMGSILTYLSMVFSPLTVFMYYGIPYLGVNAWIVCITYLQHTDPKVPHFRDNEWNFQRGAACTIDRSFGTIVNHLHHHIGDSHQCHHMFSQMPFYNAVEATKYLKAKLGKYYIFDDTPIAKALYRNWRECKFVEDEGDVVFYKH

SEQ ID NO: 6 - protein, 403 aa, Artificial sequence
  Delta-15 Desaturase
MAPPHVVDEQVRRRIVVEDEIKSKKQFERNYVPMDFTIKEIRDAIPAHLFIRDTTKSILHVVKDLVTIAIVFYCATFIETLPSLALRVPAWITYWIIQGTVMVGPWILAHECGHGAFSHPKWINYIFGWVLHSALLVPYQAWAMSHSKHHKCTGSMTKDVVFIPATRSYKGLPALEKPAVEEEVSEQEHHHHEESIFAETPIYTLGALLFVLTFGWPLYLIVNFSGHEAPHWVNHFQTVAPLYEPHQRKNIFYSNCGIVAMGSILTYLSMVFSPLTVFMYYGIPYLGVNAWIVCITYLQHTDPKVPHFRDNEWNFQRGAACTIDRSFGTIVNHLHHHIGDSHQCHHMFSQMPFYNAVEATKYLKAKLGKYYIFDDTPIAKALYRNWRECKFVEDEGDVVFYKH

SEQ ID NO: 7 - protein, 403 aa, Artificial sequence
  Delta-15 Desaturase
MAPPHVVDEQVRRRIVVEDEIKSKKQFERNYVPMDFTIKEIRDAIPAHLFIRDTTKSILHVVKDLVTIAIVFYCATFIETLPSLALRVPAWITYWIIQGTVMVGPWILAHECGHGAFSKPRAFNSIMGWVLHSALLVPYQAWAMSHSKHHKFTGSMSKDLVFIPATRSYKGLPALEKPAVEEEVSEQEHHHHEESIFAETPIYTLGALLFVLTFGWPLYLIVNFSGHEAPHWVNHFQTVAPLYEPHQRKNIFYSNCGIVAMGSILTYLSMVFSPLTVFMYYGIPYLGVNAWIVCITYLQHTDPKVPHFRDNEWNFQRGAACTIDRSFGTIVNHLHHHIGDSHQCHHMFSQMPFYNAVEATKYLKAKLGKYYIFDDTPIAKALYRNWRECKFVEDEGDVVFYKH

SEQ ID NO: 8 - protein, 403 aa, Artificial sequence
  Delta-15 Desaturase
MAPPHVVDEQVRRRIVVEDEIKSKKQFERNYVPMDFTIKEIRDAIPAHLFIRDTTKSILHVVKDLVTIAIVFYCATFIETLPSLALRVPAWITYWIIQGTVMVGPWILAHECGHGAFSQPTTINYILGWVLHSALLVPYQAWAMSHSKHHKATGNMKKDIVFIPATRSYKGLPALEKPAVEEEVSEQEHHHHEESIFAETPIYTLGALLFVLTFGWPLYLIVNFSGHEAPHWVNHFQTVAPLYEPHQRKNIFYSNCGIVAMGSILTYLSMVFSPLTVFMYYGIPYLGVNAWIVCITYLQHTDPKVPHFRDNEWNFQRGAACTIDRSFGTIVNHLHHHIGDSHQCHHMFSQMPFYNAVEATKYLKAKLGKYYIFDDTPIAKALYRNWRECKFVEDEGDVVFYKH

SEQ ID NO: 9 - protein, 403 aa, Artificial sequence
  Delta-15 Desaturase
MAPPHVVDEQVRRRIVVEDEIKSKKQFERNYVPMDFTIKEIRDAIPAHLFIRDTTKSILHVVKDLVTIAIVFYCATFIETLPSLALRVPAWITYWIIQGTVMVGPWILAHECGHGAFSKHRTINNIMGWVLHSALLVPYQAWAMSHSKHHKSTGSMSKDLVFIPATRSYKGLPALEKPAVEEEVSEQEHHHHEESIFAETPIYTLGALLFVLTFGWPLYLIVNFSGHEAPHWVNHFQTVAPLYEPHQRKNIFYSNCGIVAMGSILTYLSMVFSPLTVFMYYGIPYLGVNAWIVCITYLQHTDPKVPHFRDNEWNFQRGAACTIDRSFGTIVNHLHHHIGDSHQCHHMFSQMPFYNAVEATKYLKAKLGKYYIFDDTPIAKALYRNWRECKFVEDEGDVVFYKH

SEQ ID NO: 10 - protein, 403 aa, Artificial sequence
  Delta-15 Desaturase
MAPPHVVDEQVRRRIVVEDEIKSKKQFERNYVPMDFTIKEIRDAIPAHLFIRDTTKSILHVVKDLVTIAIVFYCATFIETLPSLALRVPAWITYWIIQGTVMVGPWILAHECGHGAFSNPRSFNSIFGWVLHSALLVPYQAWAMSHSKHHKCTGHMSKDVVFIPATRSYKGLPALEKPAVEEEVSEQEHHHHEESIFAETPIYTLGALLFVLTFGWPLYLIVNFSGHEAPHWVNHFQTVAPLYEPHQRKNIFYSNCGIVAMGSILTYLSMVFSPLTVFMYYGIPYLGVNAWIVCITYLQHTDPKVPHFRDNEWNFQRGAACTIDRSFGTIVNHLHHHIGDSHQCHHMFSQMPFYNAVEATKYLKAKLGKYYIFDDTPIAKALYRNWRECKFVEDEGDVVFYKH

SEQ ID NO: 11 - protein, 403 aa, Artificial sequence
  Delta-15 Desaturase
MAPPHVVDEQVRRRIVVEDEIKSKKQFERNYVPMDFTIKEIRDAIPAHLFIRDTTKSILHVVKDLVTIAIVFYCATFIETLPSLALRVPAWITYWIIQGTVMVGPWILAHECGHGAFSDPTRFNSIFGWVLHSALLVPYQAWAMSHSKHHKGTGSMTKDVVFIPATRSYKGLPALEKPAVEEEVSEQEHHHHEESIFAETPIYTLGALLFVLTFGWPLYLIVNFSGHEAPHWVNHFQTVAPLYEPHQRKNIFYSNCGIVAMGSILTYLSMVFSPLTVFMYYGIPYLGVNAWIVCITYLQHTDPKVPHFRDNEWNFQRGAACTIDRSFGTIVNHLHHHIGDSHQCHHMFSQMPFYNAVEATKYLKAKLGKYYIFDDTPIAKALYRNWRECKFVEDEGDVVFYKH

SEQ ID NO: 12 - protein, 403 aa, Artificial sequence
  Delta-15 Desaturase
MAPPHVVDEQVRRRIVVEDEIKSKKQFERNYVPMDFTIKEIRDAIPAHLFIRDTTKSILHVVKDLVTIAIVFYCATFIETLPSLALRVPAWITYWIIQGTVMVGPWILAHECGHGAFSNHTTINNIIGWVLHSALLVPYQAWAMSHSKHHKFTGHMAKDLVFIPATRSYKGLPALEKPAVEEEVSEQEHHHHEESIFAETPIYTLGALLFVLTFGWPLYLIVNFSGHEAPHWVNHFQTVAPLYEPHQRKNIFYSNCGIVAMGSILTYLSMVFSPLTVFMYYGIPYLGVNAWIVCITYLQHTDPKVPHFRDNEWNFQRGAACTIDRSFGTIVNHLHHHIGDSHQCHHMFSQMPFYNAVEATKYLKAKLGKYYIFDDTPIAKALYRNWRECKFVEDEGDVVFYKH

SEQ ID NO: 13 - protein, 403 aa, Artificial sequence
  Delta-15 Desaturase
MAPPHVVDEQVRRRIVVEDEIKSKKQFERNYVPMDFTIKEIRDAIPAHLFIRDTTKSILHVVKDLVTIAIVFYCATFIETLPSLALRVPAWITYWIIQGTVMVGPWILAHECGHGAFSNYKRFNTIIGWVLHSALLVPYQAWAMSHSKHHKSTGRMTKDVVFIPATRSYKGLPALEKPAVEEEVSEQEHHHHEESIFAETPIYTLGALLFVLTFGWPLYLIVNFSGHEAPHWVNHFQTVAPLYEPHQRKNIFYSNCGIVAMGSILTYLSMVFSPLTVFMYYGIPYLGVNAWIVCITYLQHTDPKVPHFRDNEWNFQRGAACTIDRSFGTIVNHLHHHIGDSHQCHHMFSQMPFYNAVEATKYLKAKLGKYYIFDDTPIAKALYRNWRECKFVEDEGDVVFYKH

SEQ ID NO: 14 - protein, 403 aa, Artificial sequence
  Delta-15 Desaturase
MAPPHVVDEQVRRRIVVEDEIKSKKQFERNYVPMDFTIKEIRDAIPAHLFIRDTTKSILHVVKDLVTIAIVFYCATFIETLPSLALRVPAWITYWIIQGTVMVGPWILAHECGHGAFSNHKWFNNIFGWVLHSALLVPYQAWAMSHSKHHKVTGHMEKDMVFIPATRSYKGLPALEKPAVEEEVSEQEHHHHEESIFAETPIYTLGALLFVLTFGWPLYLIVNFSGHEAPHWVNHFQTVAPLYEPHQRKNIFYSNCGIVAMGSILTYLSMVFSPLTVFMYYGIPYLGVNAWIVCITYLQHTDPKVPHFRDNEWNFQRGAACTIDRSFGTIVNHLHHHIGDSHQCHHMFSQMPFYNAVEATKYLKAKLGKYYIFDDTPIAKALYRNWRECKFVEDEGDVVFYKH

SEQ ID NO: 15 - protein, 403 aa, Artificial sequence
  Delta-15 Desaturase
MAPPHVVDEQVRRRIVVEDEIKSKKQFERNYVPMDFTIKEIRDAIPAHLFIRDTTKSILHVVKDLVTIAIVFYCATFIETLPSLALRVPAWITYWIIQGTVMVGPWILAHECGHGAFSDSKTINTIFGWVLHSALLVPYQAWAMSHSKHHKGTGSMTKDVVFIPATRSYKGLPALEKPAVEEEVSEQEHHHHEESIFAETPIYTLSTFIVVLTFGWPLYLIVNFSGHEAPHWVNHFQTVAPLYEPHQRKNIFYSNCGIVAMGSILTYLSMVFSPLTVFMYYGIPYLGVNAWIVCITYLQHTDPKVPHFRDNEWNFQRGAACTIDRSFGTIVNHLHHHIGDSHQCHHMFSQMPFYNAVEATKYLKAKLGKYYIFDDTPIAKALYRNWRECKFVEDEGDVVFYKH

SEQ ID NO: 16 - protein, 403 aa, Artificial sequence
  Delta-15 Desaturase
MAPPHVVDEQVRRRIVVEDEIKSKKQFERNYVPMDFTIKEIRDAIPAHLFIRDTTKSILHVVKDLVTIAIVFYCATFIETLPSLALRVPAWITYWIIQGTVMVGPWILAHECGHGAFSDSKTINTIFGWVLHSALLVPYQAWAMSHSKHHKGTGSMTKDVVFIPATRSYKGLPALEKPAVEEEVSEQEHHHHEESIFAETPIYSLSSFIVVLTFGWPLYLIVNFSGHEAPHWVNHFQTVAPLYEPHQRKNIFYSNCGIVAMGSILTYLSMVFSPLTVFMYYGIPYLGVNAWIVCITYLQHTDPKVPHFRDNEWNFQRGAACTIDRSFGTIVNHLHHHIGDSHQCHHMFSQMPFYNAVEATKYLKAKLGKYYIFDDTPIAKALYRNWRECKFVEDEGDVVFYKH

SEQ ID NO: 17 - protein, 403 aa, Artificial sequence
  Delta-15 Desaturase
MAPPHVVDEQVRRRIVVEDEIKSKKQFERNYVPMDFTIKEIRDAIPAHLFIRDTTKSILHVVKDLVTIAIVFYCATFIETLPSLALRVPAWITYWIIQGTVMVGPWILAHECGHGAFSNHKSFNSILGWVLHSALLVPYQAWAMSHSKHHKFTGTMAKDVVFIPATRSYKGLPALEKPAVEEEVSEQEHHHHEESIFAETPIYTLGALLFVLTFGWPLYLIVNFSGHEAPHWVNHFQTVAPLYEPHQRKNIFYSNCGIVAMGSILTYLSMVFSPLTVFMYYGIPYLGVNAWIVCITYLQHTDPKVPHFRDNEWNFQRGAACTIDRSFGTIVNHLHHHIGDSHQCHHMFSQMPFYNAVEATKYLKAKLGKYYIFDDTPIAKALYRNWRECKFVEDEGDVVFYKH

SEQ ID NO: 18 - protein, 403 aa, Artificial sequence
  Delta-15 Desaturase
MAPPHVVDEQVRRRIVVEDEIKSKKQFERNYVPMDFTIKEIRDAIPAHLFIRDTTKSILHVVKDLVTIAIVFYCATFIETLPSLALRVPAWITYWIIQGTVMVGPWILAHECGHGAFSDHRWFNTIMGWVLHSALLVPYQAWAMSHSKHHKFTGTMTKDVVFIPATRSYKGLPALEKPAVEEEVSEQEHHHHEESIFAETPIYTLGALLFVLTFGWPLYLIVNFSGHEAPHWVNHFQTVAPLYEPHQRKNIFYSNCGIVAMGSILTYLSMVFSPLTVFMYYGIPYLGVNAWIVCITYLQHTDPKVPHFRDNEWNFQRGAACTIDRSFGTIVNHLHHHIGDSHQCHHMFSQMPFYNAVEATKYLKAKLGKYYIFDDTPIAKALYRNWRECKFVEDEGDVVFYKH

SEQ ID NO: 19 - protein, 403 aa, Artificial sequence
  Delta-15 Desaturase
MAPPHVVDEQVRRRIVVEDEIKSKKQFERNYVPMDFTIKEIRDAIPAHLFIRDTTKSILHVVKDLVTIAIVFYCATFIETLPSLALRVPAWITYWIIQGTVMVGPWILAHECGHGAFSNYKSINNIMGWVLHSALLVPYQAWAMSHSKHHKATGSMTKDLVFIPATRSYKGLPALEKPAVEEEVSEQEHHHHEESIFAETPIYTLGALLFVLTFGWPLYLIVNFSGHEAPHWVNHFQTVAPLYEPHQRKNIFYSNCGIVAMGSILTYLSMVFSPLTVFMYYGIPYLGVNAWIVCITYLQHTDPKVPHFRDNEWNFQRGAACTIDRSFGTIVNHLHHHIGDSHQCHHMFSQMPFYNAVEATKYLKAKLGKYYIFDDTPIAKALYRNWRECKFVEDEGDVVFYKH

SEQ ID NO: 20 - protein, 403 aa, Artificial sequence
  Delta-15 Desaturase
MAPPHVVDEQVRRRIVVEDEIKSKKQFERNYVPMDFTIKEIRDAIPAHLFIRDTTKSILHVVKDLVTIAIVFYCATFIETLPSLALRVPAWITYWIIQGTVMVGPWILAHECGHGAFSNSRSINYIIGWVLHSALLVPYQTWAMSHSKHHKYTGHMTKDVVFIPATRSYKGLPALEKPAVEEEVSEQEHHHHEESIFAETPIYTLGALLFVLTFGWPLYLIVNFSGHEAPHWVNHFQTVAPLYEPHQRKNIFYSNCGIVAMGSILTYLSMVFSPLTVFMYYGIPYLGVNAWIVCITYLQHTDPKVPHFRDNEWNFQRGAACTIDRSFGTIVNHLHHHIGDSHQCHHMFSQMPFYNAVEATKYLKAKLGKYYIFDDTPIAKALYRNWRECKFVEDEGDVVFYKH

SEQ ID NO: 21 - protein, 403 aa, Artificial sequence
  Delta-15 Desaturase
MAPPHVVDEQVRRRIVVEDEIKSKKQFERNYVPMDFTIKEIRDAIPAHLFIRDTTKSILHVVKDLVTIAIVFYCATFIETLPSLALRVPAWITYWIIQGTVMVGPWILAHECGHGAFSKYKWFNSIIGWVLHSALLVPYQAWAMSHSKHHKFTGTMTKDVVFIPATRSYKGLPALEKPAVEEEVSEQEHHHHEESIFAETPIYTLGALLFVLTFGWPLYLIVNFSGHEAPHWVNHFQTVAPLYEPHQRKNIFYSNCGIVAMGSILTYLSMVFSPLTVFMYYGIPYLGVNAWIVCITYLQHTDPKVPHFRDNEWNFQRGAACTIDRSFGTIVNHLHHHIGDSHQCHHMFSQMPFYNAVEATKYLKAKLGKYYIFDDTPIAKALYRNWRECKFVEDEGDVVFYKH

SEQ ID NO: 22 - protein, 403 aa, Artificial sequence
  Delta-15 Desaturase
MAPPHVVDEQVRRRIVVEDEIKSKKQFERNYVPMDFTIKEIRDAIPAHLFIRDTTKSILHVVKDLVTIAIVFYCATFIETLPSLALRVPAWITYWIIQGTVMVGPWILAHECGHGAFSNYKWFNSILGWVLHSALLVPYQAWAMSHSKHHKDTGHMTKDVVFIPATRSYKGLPALEKPAVEEEVSEQEHHHHEESIFAETPIYTLGALLLVLTFGWPLYLIVNFSGHEAPHWVNHFQTVAPLYEPHQRKNIFYSNCGIVAMGSILTYLSMVFSPLTVFMYYGIPYLGVNAWIVCITYLQHTDPKVPHFRDNEWNFQRGAACTIDRSFGTIVNHLHHHIGDSHQCHHMFSQMPFYNAVEATKYLKAKLGKYYIFDDTPIAKALYRNWRECKFVEDEGDVVFYKH

SEQ ID NO: 23 - protein, 403 aa, Artificial sequence
  Delta-15 Desaturase
MAPPHVVDEQVRRRIVVEDEIKSKKQFERNYVPMDFTIKEIRDAIPAHLFIRDTTKSILHVVKDLVTIAIVFYCATFIETLPSLALRVPAWITYWIIQGTVMVGPWILAHECGHGAFSKHRWFNSIFGWVLHSALLVPYQAWAMSHSKHHKATGTMTKDVVFIPATRSYKGLPALEKPAVEEEVSEQEHHHHEESIFAETPIYTLGALLFVLTFGWPLYLIVNFSGHEAPHWVNHFQTVAPLYEPHQRKNIFYSNCGIVAMGSILTYLSMVFSPLTVFMYYGIPYLGVNAWIVCITYLQHTDPKVPHFRDNEWNFQRGAACTIDRSFGTIVNHLHHHIGDSHQCHHMFSQMPFYNAVEATKYLKAKLGKYYIFDDTPIAKALYRNWRECKFVEDEGDVVFYKH

SEQ ID NO: 24 - protein, 403 aa, Artificial sequence
  Delta-15 Desaturase
MAPPHVVDEQVRRRIVVEDEIKSKKQFERNYVPMDFTIKEIRDAIPAHLFIRDTTKSILHVVKDLVTIAIVFYCATFIETLPSLALRVPAWITYWIIQGTVMVGPWILAHECGHGAFSNHRRINSIIGWVLHSALLVPYQAWAMSHSKHHKATGTMTKDVVFIPATRSYKGLPALEKPAVEEEVSEQEHHHHEESIFAETPIYTLGALLFVLTFGWPLYLIVNFSGHEAPHWVNHFQTVAPLYEPHQRKNIFYSNCGIVAMGSILTYLSMVFSPLTVFMYYGIPYLGVNAWIVCITYLQHTDPKVPHFRDNEWNFQRGAACTIDRSFGTIVNHLHHHIGDSHQCHHMFSQMPFYNAVEATKYLKAKLGKYYIFDDTPIAKALYRNWRECKFVEDEGDVVFYKH

SEQ ID NO: 25 - protein, 403 aa, Artificial sequence
  Delta-15 Desaturase
MAPPHVVDEQVRRRIVVEDEIKSKKQFERNYVPMDFTIKEIRDAIPAHLFIRDTTKSILHVVKDLVTIAIVFYCATFIETLPSLALRVPAWITYWIIQGTVMVGPWILAHECGHGAFSNHRRFNSIMGWVLHSALLVPYQAWAMSHSKHHKATGTMTKDVVFIPATRSYKGLPALEKPAVEEEVSEQEHHHHEESIFAETPIYTLGALLFVLTFGWPLYLIVNFSGHEAPHWVNHFQTVAPLYEPHQRKNIFYSNCGIVAMGSILTYLSMVFSPLTVFMYYGIPYLGVNAWIVCITYLQHTDPKVPHFRDNEWNFQRGAACTIDRSFGTIVNHLHHHIGDSHQCHHMFSQMPFYNAVEATKYLKAKLGKYYIFDDTPIAKALYRNWRECKFVEDEGDVVFYKH

SEQ ID NO: 26 - protein, 403 aa, Artificial sequence
  Delta-15 Desaturase
MAPPHVVDEQVRRRIVVEDEIKSKKQFERNYVPMDFTIKEIRDAIPAHLFIRDTTKSILHVVKDLVTIAIVFYCATFIETLPSLALRVPAWITYWIIQGTVMVGPWILAHECGHGAFSKPKSINTIMGWVLHSALLVPYQAWAMSHSKHHKATGTMTKDVVFIPATRSYKGLPALEKPAVEEEVSEQEHHHHEESIFAETPIYTLGALLFVLTFGWPLYLIVNFSGHEAPHWVNHFQTVAPLYEPHQRKNIFYSNCGIVAMGSILTYLSMVFSPLTVFMYYGIPYLGVNAWIVCITYLQHTDPKVPHFRDNEWNFQRGAACTIDRSFGTIVNHLHHHIGDSHQCHHMFSQMPFYNAVEATKYLKAKLGKYYIFDDTPIAKALYRNWRECKFVEDEGDVVFYKH

SEQ ID NO: 27 - protein, 403 aa, Artificial sequence
  Delta-15 Desaturase
MAPPHVVDEQVRRRIVVEDEIKSKKQFERNYVPMDFTIKEIRDAIPAHLFIRDTTKSILHVVKDLVTIAIVFYCATFIETLPSLALRVPAWITYWIIQGTVMVGPWILAHECGHGAFSKHKSINTIFGWVLHSALLVPYQAWAMSHSKHHKATGTITKDVVFIPATRSYKGLPALEKPAVEEEVSEQEHHHHEESIFAETPIYTLGALLFVLTFGWPLYLIVNFSGHEAPHWVNHFQTVAPLYEPHQRKNIFYSNCGIVAMGSILTYLSMVFSPLTVFMYYGIPYLGVNAWIVCITYLQHTDPKVPHFRDNEWNFQRGAACTIDRSFGTIVNHLHHHIGDSHQCHHMFSQMPFYNAVEATKYLKAKLGKYYIFDYTPIAKALYRNWRECKFVEDEGDVVFYKH

SEQ ID NO: 28 - protein, 403 aa, Artificial sequence
  Delta-15 Desaturase
MAPPHVVDEQVRRRIVVEDEIKSKKQFERNYVPMDFTIKEIRDAIPAHLFIRDTTKSILHVVKDLVTIAIVFYCATFIETLPSLALRVPAWITYWIIQGTVMVGPWILAHECGHGAFSKSKTFNSIMGWVLHSALLVPYQAWAMSHSKHHKATGTMTKDVVFIPATRSYKGLPALEKPAVEEEVSEQEHHHHEESIFAETPIYTLGALLFVLTFGWPLYLIVNFSGHEAPHWVNHFQTVAPLYEPHQRKNIFYSNCGIVAMGSILTYLSMVFSPLTVFMYYGIPYLGVNAWIVCITYLQHTDPKVPHFRDNEWNFQRGAACTIDRSFGTIVNHLHHHIGDSHQCHHMFSQMPFYNAVEATKYLKAKLGKYYIFDDTPIAKALYRNWRECKFVEDEGDVVFYKH

SEQ ID NO: 29 - protein, 403 aa, Artificial sequence
  Delta-15 Desaturase
MAPPHVVDEQVRRRIVVEDEIKSKKQFERNYVPMDFTIKEIRDAIPAHLFIRDTTKSILHVVKDLVTIAIVFYCATFIETLPSLALRVPAWITYWIIQGTVMVGPWILAHECGHGAFSQYKRFNNILGWVLHSALLVPYQAWAMSHSKHHKATGTMTKDVVFIPATRSYKGLPALEKPAVEEEVSEQEHHHHEESIFAETPIYTLGALLFVLTFGWPLYLIVNFSGHEAPHWVNHFQTVAPLYEPHQRKNIFYSNCGIVAMGSILTYLSMVFSPLTVFMYYGIPYLGVNAWIVCITYLQHTDPKVPHFRDNEWNFQRGAACTIDRSFCTIVNHLHHHIGDSHQCHHMFSQMPFYNAVEATKYLKAKLGKYYIFDDTPIAKALYRNWRECKFVEDEGDVVFYKH

SEQ ID NO: 30 - protein, 403 aa, Artificial sequence
  Delta-15 Desaturase
MAPPHVVDEQVRRRIVVEDEIKSKKQFERNYVPMDFTIKEIRDAIPAHLFIRDTTKSILHVVKDLVTIAIVFYCATFIETLPSLALRVPAWITYWIIQGTVMVGPWILAHECGHGAFSHPKSINTIIGWVLHSALLVPYQAWAMSHSKHHKATGTMTKDVVFIPATRSYKGLPALEKPAVEEEVSEQEHHHHEESIFAETPIYTLGALLFVLTFGWPLYLIVNFSGHEAPHWVNHFQTVAPLYEPHQRKNIFYSNCGIVAMGSILTYLSMVFSPLTVFMYYGIPYLGVNAWIVCITYLQHTDPKVPHFRDNEWNFQRGAACTIDRSFGTIVNHLHHHIGDSHQCHHMFSQMPFYNAVEATKYLKAKLGKYYIFDDTPIAKALYRNWRECKFVEDEGDVVFYKH

SEQ ID NO: 31 - protein, 403 aa, Artificial sequence
  Delta-15 Desaturase
MAPPHVVDEQVRRRIVVEDEIKSKKQFERNYVPMDFTIKEIRDAIPAHLFIRDTTKSILHVVKDLVTIAIVFYCATFIETLPSLALRVPAWITYWIIQGTVMVGPWILAHECGHGAFSESKTFNTIIGWVLHSALLVPYQAWAMSHSKHHKATCTMTKDVVFIPATRSYKGLPALEKPAVEEEVSEQEHHHHEESIFAETPIYTLGALLFVLTFGWPLYLIVNFSGHEAPHWVNHFQTVAPLYEPHQRKNIFYSNCGIVAMGSILTYLSMVFSPLTVFMYYGIPYLGVNAWIVCITYLQHTDPKVPHFRDNEWNFQRGAACTIDRSFGTIVNHLHHHIGDSHQCHHMFSQMPFYNAVEATKYLKAKLGKYYIFDDTPIAKALYRNWRECKFVEDEGDVVFYKH

SEQ ID NO: 32 - protein, 403 aa, Artificial sequence
  Delta-15 Desaturase
MAPPHVVDEQVRRRIVVEDEIKSKKQFERNYVPMDFTIKEIRDAIPAHLFIRDTTKSILHVVKDLVTIAIVFYCATFIETLPSLALRVPAWITYWIIQGTVMVGPWILAHECGHGAFSQPRWFNTILGWVLHSALLVPYQAWAMSHSKHHKFTGTMAKDVVFIPATRSYKGLPALEKPAVEEEVSEQEHHHHEESIFAETPIYTLGALLFVLTFGWPLYLIVNFSGHEAPHWVNHFQTVAPLYEPHQRKNIFYSNCGIVAMGSILTYLSMVFSPLTVFMYYGIPYLGVNAWIVCITYLQHTDPKVPHFRDNEWNFQRGAACTIDRSFGTIVNHLHHHIGDSHQCHHMFSQMPFYNAVEATKYLKAKLGKYYIFDDTPIAKALYRNWRECKFVEDEGDVVFYKH

SEQ ID NO: 33 - protein, 403 aa, Artificial sequence
  Delta-15 Desaturase
MAPPHVVDEQVRRRIVVEDEIKSKKQFERNYVPMDFTIKEIRDAIPAHLFIRDTTKSILHVVKDLVTIAIVFYCATFIETLPSLALRVPAWITYWIIQGTVMVGPWILAHECGHGAFSQSKTINTIFGWVLHSALLVPYQAWAMSHSKHHKFTGTMAKDVVFIPATRSYKGLPALEKPAVEEEVSEQEHHHHEESIFAETPIYTLGALLFVLTFGWPLYLIVNFSGHEAPHWVNHFQTVAPLYEPHQRKNIFYSNCGIVAMGSILTYLSMVFSPLTVFMYYGIPYLGVNAWIVCITYLQHTDPKVPHFRDNEWNFQRGAACTIDRSFGTIVNHLHHHIGDSHQCHHMFSQMPFYNAVEATKYLKAKLGKYYIFDDTPIAKALYRNWRECKFVEDEGDVVFYKH

SEQ ID NO: 34 - protein, 403 aa, Artificial sequence
  Delta-15 Desaturase
MAPPHVVDEQVRRRIVVEDEIKSKKQFERNYVPMDFTIKEIRDAIPAHLFIRDTTKSILHVVKDLVTIAIVFYCATFIETLPSLALRVPAWITYWIIQGTVMVGPWILAHECGHGAFSKYKSINNILGWVLHSALLVPYQAWAMSHSKHHKFTGTMAKDVVFIPATRSYKGLPALEKPAVEEEVSEQEHHHHEESIFAETPIYTLGALLFVLTFGWPLYLIVNFSGHEAPHWVNHFQTVAPLYEPHQRKNIFYSNCGIVAMGSILTYLSMVFSPLTVFMYYGIPYLGVNAWIVCITYLQHTDPKVPHFRDNEWNFQRGAACTIDRSFGTIVNHLHHHIGDSHQCHHMFSQMPFYNAVEATKYLKAKLGKYYIFDDTPIAKALYRNWRECKFVEDEGDVVFYKH

SEQ ID NO: 35 - protein, 403 aa, Artificial sequence
  Delta-15 Desaturase
MAPPHVVDEQVRRRIVVEDEIKSKKQFERNYVPMDFTIKEIRDAIPAHLFIRDTTKSILHVVKDLVTIAIVFYCATFIETLPSLALRVPAWITYWIIQGTVMVGPWILAHECGHGAFSKYKSINTIMGWVLHSALLVPYQAWAMSHSKHHKFTGTMAKDVVFIPATRSYKGLPALEKPAVEEEVSEQEHHHHEESIFAETPIYTLGALLFVLTFGWPLYLIVNFSGHEAPHWVNHFQTVAPLYEPHQRKNIFYSNCGIVAMGSILTYLSMVFSPLTVFMYYGIPYLGVNAWIVCITYLQHTDPKVPHFRDNEWNFQRGAACTIDRSFGTIVNHLHHHIGDSHQCHHMFSQMPFYNAVEATKYLKAKLGKYYIFDDTPIAKALYRNWRECKFVEDEGDVVFYKH

SEQ ID NO: 36 - protein, 403 aa, Artificial sequence
  Delta-15 Desaturase
MAPPHVVDEQVRRRIVVEDEIKSKKQFERNYVPMDFTIKEIRDAIPAHLFIRDTTKSILHVVKDLVTIAIVFYCATFIETLPSLALRVPAWITYWIIQGTVMVGPWILAHECGHGAFSESRTFNTILGWVLHSALLVPYQAWAMSHSKHHKFTGTMAKDVVFIPATRSYKGLPALEKPAVEEEVSEQEHHHHEESIFAETPIYTLGALLFVLTFGWPLYLIVNFSGHEAPHWVNHFQTVAPLYEPHQRKNIFYSNCGIVAMGSILTYLSMVFSPLTVFMYYGIPYLGVNAWIVCITYLQHTDPKVPHFRDNEWNFQRGAACTIDRSFGTIVNHLHHHIGDSHQCHHMFSQMPFYNAVEATKYLKAKLGKYYIFDDTPIAKALYRNWRECKFVEDEGDVVFYKH

SEQ ID NO: 37 - protein, 403 aa, Artificial sequence
  Delta-15 Desaturase
MAPPHVVDEQVRRRIVVEDEIKSKKQFERNYVPMDFTIKEIRDAIPAHLFIRDTTKSILHVVKDLVTIAIVFYCATFIETLPSLALRVPAWITYWIIQGTVMVGPWILAHECGHGAFSKHRRFNSIIGWVLHSALLVPYQAWAMSHSKHHKFTGTMAKDVVFIPATRSYKGLPALEKPAVEEEVSEQEHHHHEESIFAETPIYTLGALLFVLTFGWPLYLIVNFSGHEAPHWVNHFQTVAPLYEPHQRKNIFYSNCGIVAMGSILTYLSMVFSPLTVFMYYGIPYLGVNAWIVCITYLQHTDPKVPHFRDNEWNFQRGAACTIDRSFGTIVNHLHHHIGDSHQCHHMFSQMPFYNAVEATKYLKAKLGKYYIFDDTPIAKALYRNWRECKFVEDEGDVVFYKH

SEQ ID NO: 38 - protein, 403 aa, Artificial sequence
  Delta-15 Desaturase
MAPPHVVDEQVRRRIVVEDEIKSKKQFERNYVPMDFTIKEIRDAIPAHLFIRDTTKSILHVVKDLVTIAIVFYCATFIETLPSLALRVPAWITYWIIQGTVMVGPWILAHECGHGAFSKHKSINTIIGWVLHSALLVPYQAWAMSHSKHHKFTGTMAKDVVFIPATRSYKGLPALEKPAVEEEVSEQEHHHHEESIFAETPIYTLGALLFVLTFGWPLYLIVNFSGHEAPHWVNHFQTVAPLYEPHQRKNIFYSNCGIVAMGSILTYLSMVFSPLTVFMYYGIPYLGVNAWIVCITYLQHTDPKVPHFRDNEWNFQRGAACTIDRSFGTIVNHLHHHIGDSHQCHHMFSQMPFYNAVEATKYLKAKLGKYYIFDDTPIAKALYRNWRECKFVEDEGDVVFYKH

SEQ ID NO: 39 - protein, 403 aa, Artificial sequence
  Delta-15 Desaturase
MAPPHVVDEQVRRRIVVEDEIKSKKQFERNYVPMDFTIKEIRDAIPAHLFIRDTTKSILHVVKDLVTIAIVFYCATFIETLPSLALRVPAWITYWIIQGTVMVGPWILAHECGHGAFSKSRWINTIIGWVLHSALLVPYQAWAMSHSKHHKSTGTMTKDVVFIPATRSYKGLPALEKPAVEEEVSEQEHHHHEESIFAETPIYTLGALLFVLTFGWPLYLIVNFSGHEAPHWVNHFQTVAPLYEPHQRKNIFYSNCGIVAMGSILTYLSMVFSPLTVFMYYGIPYLGVNAWIVCITYLQHTDPKVPHFRDNEWNFQRGAACTIDRSFGTIVNHLHHHIGDSHQCHHMFSQMPFYNAVEATKYLKAKLGKYYILDDTPIAKALYRNWRECKFVEDEGDVVFYKH

SEQ ID NO: 40 - protein, 403 aa, Artificial sequence
  Delta-15 Desaturase
MAPPHVVDEQVRRRIVVEDEIKSKKQFERNYVPMDFTIKEIRDAIPAHLFIRDTTKSIQHVVKDLVTIAIVFYCATFIETLPSLALRVPAWITYWIIQGTVMVGPWILAHECGHGAFSDSKTINTIFGWVLHSALLVPYQAWAMSHSKHHKGTGSMTKDVVFIPATEWHESTRNLEKPAVEEEVSEQEHHHHEESIFAETPIYTLGALLFVLTFGWPLYLIVNFSGHEAPHWVNHFQTVAPLYEPHQRKNIFYSNCGIVAMGSILTYLSMVFSPLTVFMYYGIPYLGVNAWIVCITYLQHTDPKVPHFRDNEWNFQRGAACTIDRSFGTIVNHLHHHIGDSHQCHHMFSQMPFYNAVEATKYLKAKLGKYYIFDDTPIAKALYRNWRECKFVEDEGDVVFYKH

SEQ ID NO: 41 - protein, 403 aa, Artificial sequence
  Delta-15 Desaturase
MAPPHVVDEQVRRRIVVEDEIKSKKQFERNYVPMDFTIKEIRDAIPAHLFIRDTTKSILHVVKDLVTIAIVFYCATFIETLPSLALRVPAWITYWIIQGTVMVGPWILAHECGHGAFSDSKTINTIFGWVLHSALLVPYQAWAMSHSKHHKGTGSMTKDVVFIPATETVRSLPDLEKPAVEEEVSEQEHHHHEESIFAETPIYTLGALLFVLTFGWPLYLIVNFSGHEAPHWVNHFQTVAPLYEPHQRKNIFYSNCGIVAMGSILTYLSMVFSPLTVFMYYGIPYLGVNAWIVCITYLQHTDPKVPHFRDNEWNFQRGAACTIDRSFGTIVNHLHHHIGDSHQCHHMFSQMPFYNAVEATKYLKAKLGKYYIFDDTPIAKALYRNWRECKFVEDEGDVVFYKH

SEQ ID NO: 42 - protein, 403 aa, Artificial sequence
  Delta-15 Desaturase
MAPPHVVDEQVRRRIVVEDEIKSKKQFERNYVPMDFTIKEIRDAIPAHLFIRDTTKSILHVVKDLVTIAIVFYCATFIETLPSLALRVPAWITYWIIQGTVMVGPWILAHECGHGAFSDSKTINTIFGWVLHSALLVPYQAWAMSHSKHHKGTGSMTKDVVFIPATRSYKGLPALEKPAVEEEVSEQEHHHHEESIFAETPIYTLGALLFVLTFGWPLYLIVNFSGHEAPHWVNHFQTVSTFFKDQQRKNIFYSNCGIVAMGSILTYLSMVFSPLTVFMYYGIPYLGVNAWIVCITYLQHTDPKVPHFRDNEWNFQRGAACTIDRSFGTIVNHLHHHIGDSHQCHHMFSQMPFYNAVEATKYLKAKLGKYYIFDDTPIAKALYRNWRECKFVEDEGDVVFYKH

SEQ ID NO: 43 - protein, 403 aa, Artificial sequence
  Delta-15 Desaturase
MAPPHVVDEQVRRRIVVEDEIKSKKQFERNYVPMDFTIKEIRDAIPAHLFIRDTTKSILHVVKDLVTIAIVFYCATFIETLPSLALRVPAWITYWIIQGTVMVGPWILAHECGHGAFSHYRRFNSILGWVLHSALLVPYQAWAMSHSKHHKFTGTMAKDVVFIPATRSYKGLPALYIVSRNKEVSEQEHHHHEESIFAETPIYTLGALLFVLTFGWPLYLIVNFSGHEAPHWVNHFQTVAPLYEPHQRKNIFYSNCGIVAMGSILTYLSMVFSPLTVFMYYGIPYLGVNAWIVCITYLQHTDPKVPHFRDNEWNFQRGAACTIDRSFGTIVNHLHHHIGDSHQCHHMFSQMPFYNAVEATKYLKAKLGKYYIFDDTPIAKALYRNWRECKFVEDEGDVVFYKH

SEQ ID NO: 44 - protein, 403 aa, Artificial sequence
  Delta-15 Desaturase
MAPPHVVDEQVRRRIVVEDEIKSKKQFERNYVPMDFTIKEIRDAIPAHLFIRDTTKSILHVVKDLVTIAIVFYCATFIETLPSLALRVPAWITYWIIQGTVMVGPWILAHECGHGAFSHYRRFNSILGWVLHSALLVPYQAWAMSHSKHHKFTGTMAKDVVFIPATRSYKGLPARSFVAGDNEVSEQEHHHHEESIFAETPIYTLGALLFVLTFGWPLYLIVNFSGHEAPHWVNHFQTVAPLYEPHQRKNIFYSNCGIVAMGSILTYLSMVFSPLTVFMYYGIPYLGVNAWIVCITYLQHTDPKVPHFRDNEWNFQRGAACTIDRSFGTIVNHLHHHIGDSHQCHHMFSQMPFYNAVEATKYLKAKLGKYYIFDDTPIAKALYRNWRECKFVEDEGDVVFYKH

SEQ ID NO: 45 - protein, 403 aa, Artificial sequence
  Delta-15 Desaturase
MAPPHVVDEQVRRRIVVEDEIKSKKQFERNYVPMDFTIKEIRDAIPAHLFIRDTTKSILHVVKDLVTIAIVFYCATFIETLPSLALRVPAWITYWIIQGTVMVGPWILAHECGHGAFSHYRRFNSILGWVLHSALLVPYQAWAMSHSKHHKFTGTMAKDVVFIPATRSYKGLPALEKPAVEEEVSEQEHHHHEESIFAETPIYTLGALLFVLTFGWPLYLIVNFSGHEAPHWVNHFQTVAPLYEPHQRKNIFYSNCGIVAMGSILTYLSMVFSPLTVFMYYGIPYLGVNAWIVCITYLQHTDPKVPHFRDNEWNFQRGAACTIDRSFGTIVNHLHHHIGDSHQCHHMFSQMPFYNAVEATKYLKAKLGKYYIFDDTPIAKALYRNWRECKFVEDEGDVVFYKH

SEQ ID NO: 46 - protein, 403 aa, Artificial sequence
  Delta-15 Desaturase
MAPPHVVDEQVRRRIVVEDEIKSKKQFERNYVPMDFTIKEIRDAIPAHLFIRDTTKSILHVVKDLVTIAIVFYCATFIETLPSLALRVPAWITYWIIQGTVMVGPWILAHECGHGAFSKYKWFNSIIGWVLHSALLVPYQAWAMSHSKHHKFTGTMTKDVVFIPATRSYKGLPALEKPAVEEEVSEQEHHHHEESIFAETPIYTLGALLFVLTFGWPLYLIVNFSGHEAPHWVNHFQPGSALFGPRQRKNIFYSNCGIVAMGSILTYLSMVFSPLTVFMYYGIPYLGVNAWIVCITYLQHTDPKVPHFRDNEWNFQRGAACTIDRSFGTIVNHLHHHIGDSHQCHHMFSQMPFYNAVEATKYLKAKLGKYYIFDDTPIAKALYRNWRECKFVEDEGDVVFYKH

SEQ ID NO: 47 - protein, 403 aa, Artificial sequence
  Delta-15 Desaturase
MAPPHVVDEQVRRRIVVEDEIKSKKQFERNYVPMDFTIKEIRDAIPAHLFIRDTTKSILHVVKDLVTIAIVFYCATFIETLPSLALRVPAWITYWIIQGTVMVGPWILAHECGHGAFSHYRRFNSILGWVLHSALLVPYQAWAMSHSKHHKFTGTMAKDVVFIPATRSYKGLPARDYVDWEEEVSEQEHHHHEESIFAETPIYTLGALLFVLTFGWPLYLIVNFSGHEAPHWVNHFQTVAPLYEPHQRKNIFYSNCGIVAMGSILTYLSMVFSPLTVFMYYGIPYLGVNAWIVCITYLQHTDPKVPHFRDNEWNFQRGAACTIDRSFGTIVNHLHHHIGDSHQCHHMFSQMPFYNAVEATKYLKAKLGKYYIFDDTPIAKALYRNWRECKFVEDEGDVVFYKH

SEQ ID NO: 48 - protein, 403 aa, Artificial sequence
  Delta-15 Desaturase
MAPPHVVDEQVRRRIVVEDEIKSKKQFERNYVPMDFTIKEIRDAIPAHLFIRDTTKSILHVVKDLVTIAIVFYCATFIETLPSLALRVPAWITYWIIQGTVMVGPWILAHECGHGAFSKYRSINYIMGWVLHSALLVPYQAWAMSHSKHHKATGNMAKDMVFIPATRSYKGLPALEKPAVEEEVSEQEHHHHEESIFAETPIYTLGALLFVLTFGWPLYLIVNFSGHEAPHWVNHFQATSSIFATNQRKNIFYSNCGIVAMGSILTYLSMVFSPLTVFMYYGIPYLGVNAWIVCITYLQHTDPKVPHFRDNEWNFQRGAACTIDRSFGTIVNHLHHHIGDSHQCHHMFSQMPFYNAVEATKYLKAKLGKYYIFDDTPIAKALYRNWRECKFVEDEGDVVFYKH

SEQ ID NO: 49 - protein, 403 aa, Artificial sequence
  Delta-15 Desaturase
MAPPHVVDEQVRRRIVVEDEIKSKKQFERNYVPMDFTIKEIRDAIPAHLFIRDTTKSILHVVKDLVTIAIVFYCATFIETLPSLALRVPAWITYWIIQGTVMVGPWILAHECGHGAFSKYRSINYIMGWVLHSALLVPYQAWAMSHSKHHKATGNMAKDMVFIPATRSYKGLPALEKPAVEEEVSEQEHHHHEESIFAETPIYTLGALLFVLTFGWPLYLIVNFSGNEAPHWVNHFQAVTPLFADRQRKNIFYSNCGIVAMGSILTYLSMVFSPLTVFMYYGIPYLGVNAWIVCITYLQHTDPKVPHFRDNEWNFQRGAACTIDRSFGTIVNHLHHHIGDSHQCHHMFSQMPFYNAVEATKYLKAKLGKYYIFDDTPIAKALYRNWRECKFVEDEGDVVFYKH

SEQ ID NO: 50 - protein, 403 aa, Artificial sequence
  Delta-15 Desaturase
MAPPHVVDEQVRRRIVVEDEIKSKKQFERNYVPMDFTIKEIRDAIPAHLFIRDTTKSILHVVKDLVTIAIVFYCATFIETLPSLALRVPAWITYWIIQGTVMVGPWILAHECGHGAFSKYKWFNSIIGWVLHSALLVPYQAWAMSHSKHHKFTGTMTKDVVFIPATRSYKGLPALEKPAVEEEVSEQEHHHHEESIFAETPIYTLGALLFVLTFGWPLYLIVNFSGHEAPHWVNHFQPASPLFGTKQRKNIFYSNCGIVAMGSILTYLSMVFSPLTVFMYYGIPYLGVNAWIVCITYLQHTDPKVPHFRDNEWNFQRGAACTIDRSFGTIVNHLHHHIGDSHQCHHMFSQMPFYNAVEATKYLKAKLGKYYIFDDTPIAKALYRNWRECKFVEDEGDVVFYKH

SEQ ID NO: 51 - protein, 403 aa, Artificial sequence
  Delta-15 Desaturase
MAPPHVVDEQVRRRIVVEDEIKSKKQFERNYVPMDFTIKEIRDAIPAHLFIRDTTKSILHVVKDLVTIAIVFYCATFIETLPSLALRVPAWITYWIIQGTVMVGPWILAHECGHGAFSHHKWFNTILGWVLHSALLVPYQAWAMSHSKHHKFTGTMAKDVVFIPATRSYKGLPARDYASVNDEVSEQEHHHHEESIFAETPIYTLGALLFVLTFGWPLYLIVNFSGHEAPHWVNHFQTVAPLYEPHQRKNIFYSNCGIVAMGSILTYLSMVFSPLTVFMYYGIPYLGVNAWIVCITYLQHTDPKVPHFRDNEWNFQRGAACTIDRSFGTIVNHLHHHIGDSHQCHHMFSQMPFYNAVEATKYLKAKLGKYYIFDDTPIAKALYRNWRECKFVEDEGDVVFYKH

SEQ ID NO: 52 - protein, 403 aa, Artificial sequence
  Delta-15 Desaturase
MAPPHVVDEQVRRRIVVEDEIKSKKQFERNYVPMDFTIKEIRDAIPAHLFIRDTTKSILHVVKDLVTIAIVFYCATFIETLPSLALRVPAWITYWIIQGTVMVGPWILAHECGHGAFSHHKWFNTILGWVLHSALLVPYQAWAMSHSKHHKFTGTMAKDVVFIPATRSYKGLPARSIVALNKEVSEQEHHHHEESIFAETPIYTLGALLFVLTFGWPLYLIVNFSGHEAPHWVNHFQTVAPLYEPHQRKNIFYSNCGIVAMGSILTYLSMVFSPLTVFMYYGIPYLGVNAWIVCITYLQHTDPKVPHFRDNEWNFQRGAACTIDRSFGTIVNHLHHHIGDSHQCHHMFSQMPFYNAVEATKYLKAKLGKYYIFDDTPIAKALYRNWRECKFVEDEGDVVFYKH

SEQ ID NO: 53 - protein, 403 aa, Artificial sequence
  Delta-15 Desaturase
MAPPHVVDEQVRRRIVVEDEIKSKKQFERNYVPMDFTIKEIRDAIPAHLFIRDTTKSILHVVKDLVTIAIVFYCATFIETLPSLALRVPAWITYWIIQGTVMVGPWILAHECGHGAFSHHKWFNTILGWVLHSALLVPYQAWAMSHSKHHKFTGTMAKDVVFIPATRSYKGLPAVSVPSMKDEVSEQEHHHHEESIFAETPIYTLGALLFVLTFGWPLYLIVNFSGHEAPHWVNHFQTVAPLYEPHQRKNIFYSNCGIVAMGSILTYLSMVFSPLTVFMYYGIPYLGVNAWIVCITYLQHTDPKVPHFRDNEWNFQRGAACTIDRSFGTIVNHLHHHIGDSHQCHHMFSQMPFYNAVEATKYLKAKLGKYYIFDDTPIAKALYRNWRECKFVEDEGDVVFYKH

SEQ ID NO: 54 - protein, 403 aa, Artificial sequence
  Delta-15 Desaturase
MAPPHVVDEQVRRRIVVEDEIKSKKQFERNYVPMDFTIKEIRDAIPAHLFIRDTTKSILHVVKDLVTIAIVFYCATFIETLPSLALRVPAWITYWIIQGTVMVGPWILAHECGHGAFSHHKWFNTILGWVLHSALLVPYQAWAMSHSKHHKFTGTMAKDVVFIPATRSYKGLPALAILDVQDEVSEQEHHHHEESIFAETPIYTLGALLFVLTFGWPLYLIVNFSGHEAPHWVNHFQTVAPLYEPHQRKNIFYSNCGIVAMGSILTYLSMVFSPLTVFMYYGIPYLGVNAWIVCITYLQHTDPKVPHFRDNEWNFQRGAACTIDRSFGTIVNHLHHHIGDSHQCHHMFSQMPFYNAVEATKYLKAKLGKYYIFDDTPIAKALYRNWRECKFVEDEGDVVFYKH

SEQ ID NO: 55 - protein, 403 aa, Artificial sequence
  Delta-15 Desaturase
MAPPHVVDEQVRRRIVVEDEIKSKKQFERNYVPMDFTIKEIRDAIPAHLFIRDTTKSILHVVKDLVTIAIVFYCATFIETLPSLALRVPAWITYWIIQGTVMVGPWILAHECGHGAFSKHRRINTIIGWVLHSALLVPYQALAMSHSKHHKGTGSMEKDLVFIPATRSYKGLPALEKPAVEEEVSEQEHHHHEESIFAETPIYTLGALLFVLTFGWPLYLIVNFSGHEAPHWVNHFQSTSTLFEARQRKNIFYSNCGIVAMGSILTYLSMVFSPLTVFMYYGIPYLGVNAWIVCITYLQHTDPKVPHFRDNEWNFQRGAACTIDRSFGTIVNHLHHHIGDSHQCHHMFSQMPFYNAVEATKYLKAKLGKYYIFDDTPIAKALYRNWRECKFVEDEGDVVFYKH

SEQ ID NO: 56 - protein, 403 aa, Artificial sequence
  Delta-15 Desaturase
MAPPHVVDEQVRRRIVVEDEIKSKKQFERNYVPMDFTIKEIRDAIPAHLFIRDTTKSILHVVKDLVTIAIVFYCATFIETLPSLALRVPAWITYWIIQGTVMVGPWILAHECGHGAFSHHKWFNTILGWVLHSALLVPYQAWAMSHSKHHKFTGTMAKDVVFIPATRSYKGLPAVSYLYMKKEVSEQEHHHHEESIFAETPIYTLGALLFVLTFGWPLYLIVNFSGHEAPHWVNHFQTVAPLYEPHQRKNIFYSNCGIVAMGSILTYLSMVFSPLTVFMYYGIPYLGVNAWIVCITYLQHTDPKVPHFRDNEWNFQRGAACTIDRSFGTIVNHLHHHIGDSHQCHHMFSQMPFYNAVEATKYLKAKLGKYYIFDDTPIAKALYRNWRECKFVEDEGDVVFYKH

SEQ ID NO: 57 - protein, 403 aa, Artificial sequence
  Delta-15 Desaturase
MAPPHVVDEQVRRRIVVEDEIKSKKQFERNYVPMDFTIKEIRDAIPAHLFIRDTTKSILHVVKDLVTIAIVFYCATFIETLPSLALRVPAWITYWIIQGTVMVGPWILAHECGHGAFSKYKWFNSIIGWVLHSALLVPYQAWAMSHSKHHKFTGTMTKDVVFIPATRSYKGLPAVNVLAREDEVSEQEHHHHEESIFAETPIYTLGALLFVLTFGWPLYLIVNFSGHEAPHWVNHFQTVAPLYEPHQRKNIFYSNCGIVAMGSILTYLSMVFSPLTVFMYYGIPYLGVNAWIVCITYLQHTDPKVPHFRDNEWNFQRGAACTIDRSFGTIVNHLHHHIGDSHQCHHMFSQMPFYNAVEATKYLKAKLGKYYIFDDTPIAKALYRNWRECKFVEDEGDVVFYKH

SEQ ID NO: 58 - protein, 403 aa, Artificial sequence
  Delta-15 Desaturase
MAPPHVVDEQVRRRIVVEDEIKSKKQFERNYVPMDFTIKEIRDAIPAHLFIRDTTKSILHVVKDLVTIAIVFYCATFIETLPSLALRVPAWITYWIIQGTVMVGPWILAHECGHGAFSKYKWFNSIIGWVLHSALLVPYQAWAMSHSKHHKFTGTMTKDVVFIPATRSYKGLPARDIVYMDEEVSEQEHHHHEESIFAETPIYTLGALLFVLTFGWPLYLIVNFSGHEAPHWVNHFQTVAPLYEPHQRKNIFYSNCGIVAMGSILTYLSMVFSPLTVFMYYGIPYLGVNAWIVCITYLQHTDPKVPHFRDNEWNFQRGAACTIDRSFGTIVNHLHHHIGDSHQCHHMFSQMPFYNAVEATKYLKAKLGKYYIFDDTPIAKALYRNWRECKFVEDEGDVVFYKH

SEQ ID NO: 59 - protein, 403 aa, Artificial sequence
  Delta-15 Desaturase
MAPPHVVDEQVRRRIVVEDEIKSKKQFERNYVPMDFTIKEIRDAIPAHLFIRDTTKSILHVVKDLVTIAIVFYCATFIETLPSLALRVPAWITYWIIQGTVMVGPWILAHECGHGAFSKHRRINTIIGWVLHSALLVPYQALAMSHSKHHKGTGSMEKDLVFIPATRSYKGLPAVSIPDRDEEVSEQEHHHHEESIFAETPIYTLGALLFVLTFGWPLYLIVNFSGHEAPHWVNHFQTVAPLYEPHQRKNIFYSNCGIVAMGSILTYLSMVFSPLTVFMYYGIPYLGVNAWIVCITYLQHTDPKVPHFRDNEWNFQRGAACTIDRSFGTIVNHLHHHIGDSHQCHHMFSQMPFYNAVEATKYLKAKLGKYYIFDDTPIAKALYRNWRECKFVEDEGDVVFYKH

SEQ ID NO: 60 - protein, 403 aa, Artificial sequence
  Delta-15 Desaturase
MAPPHVVDEQVRRRIVVEDEIKSKKQFERNYVPMDFTIKEIRDAIPAHLFIRDTTKSILHVVKDLVTIAIVFYCATFIETLPSLALRVPAWITYWIIQGTVMVGPWILAHECGHGAFSKHRRINTIIGWVLHSALLVPYQALAMSHSKHHKGTGSMEKDLVFIPATRSYKGLPALYFADLDKEVSEQEHHHHEESIFAETPIYTLGALLFVLTFGWPLYLIVNFSGHEAPHWVNHFQTVAPLYEPHQRKNIFYSNCGIVAMGSILTYLSMVFSPLTVFMYYGIPYLGVNAWIVCITYLQHTDPKVPHFRDNEWNFQRGAACTIDRSFGTIVNHLHHHIGDSHQCHHMFSQMPFYNAVEATKYLKAKLGKYYIFDDTPIAKALYRNWRECKFVEDEGDVVFYKH

SEQ ID NO: 61 - protein, 403 aa, Artificial sequence
  Delta-15 Desaturase
MAPPHVVDEQVRRRIVVEDEIKSKKQFERNYVPMDFTIKEIRDAIPAHLFIRDTTKSILHVVKDLVTIAIVFYCATFIETLPSLALRVPAWITYWIIQGTVMVGPWILAHECGHGAFSKHRRINTIIGWVLHSALLVPYQALAMSHSKHHKGTGSMEKDLVFIPATRSYKGLPARDDPYMNKEVSEQEHHHHEESIFAETPIYTLGALLFVLTFGWPLYLIVNFSGHEAPHWVNHFQTVAPLYEPHQRKNIFYSNCGIVAMGSILTYLSMVFSPLTVFMYYGIPYLGVNAWIVCITYLQHTDPKVPHFRDNEWNFQRGAACTIDRSFGTIVNHLHHHIGDSHQCHHMFSQMPFYNAVEATKYLKAKLGKYYIFDDTPIAKALYRNWRECKFVEDEGDVVFYKH

SEQ ID NO: 62 - protein, 403 aa, Artificial sequence
  Delta-15 Desaturase
MAPPHVVDEQVRRRIVVEDEIKSKKQFERNYVPMDFTIKEIRDAIPAHLFIRDTTKSILHVVKDLVTIAIVFYCATFIETLPSLALRVPAWITYWIIQGTVMVGPWILAHECGHGAFSKHRRINTIIGWVLHSALLVPYQALAMSHSKHHKGTGSMEKDLVFIPATRSYKGLPARYILDMNDEVSEQEHHHHEESIFAETPIYTLGALLFVLTFGWPLYLIVNFSGHEAPHWVNHFQTVAPLYEPHQRKNIFYSNCGIVAMGSILTYLSMVFSPLTVFMYYGIPYLGVNAWIVCITYLQHTDPKVPHFRDNEWNFQRGAACTIDRSFGTIVNHLHHHIGDSHQCHHMFSQMPFYNAVEATKYLKAKLGKYYIFDDTPIAKALYRNWRECKFVEDEGDVVFYKH

SEQ ID NO: 63 - protein, 403 aa, Artificial sequence
  Delta-15 Desaturase
MAPPHVVDEQVRRRIVVEDEIKSKKQFERNYVPMDFTIKEIRDAIPAHLFIRDTTKSILHVVKDLVTIAIVFYCATFIETLPSLALRVPAWITYWIIQGTVMVGPWILAHECGHGAFSKHRRINTIIGWVLHSALLVPYQALAMSHSKHHKGTGSMEKDLVFIPATRSYKGLPALDFPARQKEVSEQEHHHHEESIFAETPIYTLGALLFVLTFGWPLYLIVNFSGHEAPHWVNHFQTVAPLYEPHQRKNIFYSNCGIVAMGSILTYLSMVFSPLTVFMYYGIPYLGVNAWIVCITYLQHTDPKVPHFRDNEWNFQRGAACTIDRSFGTIVNHLHHHIGDSHQCHHMFSQMPFYNAVEATKYLKAKLGKYYIFDDTPIAKALYRNWRECKFVEDEGDVVFYKH

SEQ ID NO: 64 - protein, 403 aa, Artificial sequence
  Delta-15 Desaturase
MAPPHVVDEQVRRRIVVEDEIKSKKQFERNYVPMDFTIKEIRDAIPAHLFIRDTTKSILHVVKDLVTIAIVFYCATFIETLPSLALRVPAWITYWIIQGTVMVGPWILAHECGHGAFSKHRRINTIIGWVLHSALLVPYQALAMSHSKHHKGTGSMEKDLVFIPATRSYKGLPARNFLDMENEVSEQEHHHHEESIFAETPIYTLGALLFVLTFGWPLYLIVNFSGHEAPHWVNHFQTVAPLYEPHQRKNIFYSNCGIVAMGSILTYLSMVFSPLTVFMYYGIPYLGVNAWIVCITYLQHTDPKVPHFRDNEWNFQRGAACTIDRSFGTIVNHLHHHIGDSHQCHHMFSQMPFYNAVEATKYLKAKLGKYYIFDDTPIAKALYRNWRECKFVEDEGDVVFYKH

SEQ ID NO: 65 - protein, 403 aa, Artificial sequence
  Delta-15 Desaturase
MAPPHVVDEQVRRRIVVEDEIKSKKQFERNYVPMDFTIKEIRDAIPAHLFIRDTTKSILHVVKDLVTIAIVFYCATFIETLPSLALRVPAWITYWIIQGTVMVGPWILAHECGHGAFSKHRRINTIIGWVLHSALLVPYQALAMSHSKHHKGTGSMEKDLVFIPATRSYKGLPALAVPDRQKEVSEQEHHHHEESIFAETPIYTLGALLFVLTFGWPLYLIVNFSGHEAPHWVNHFQTVAPLYEPHQRKNIFYSNCGIVAMGSILTYLSMVFSPLTVFMYYGIPYLGVNAWIVCITYLQHTDPKVPHFRDNEWNFQRGAACTIDRSFGTIVNHLHHHIGDSHQCHHMFSQMPFYNAVEATKYLKAKLGKYYIFDDTPIAKALYRNWRECKFVEDEGDVVFYKH

SEQ ID NO: 66 - protein, 403 aa, Artificial sequence
  Delta-15 Desaturase
MAPPHVVDEQVRRRIVVEDEIKSKKQFERNYVPMDFTIKEIRDAIPAHLFIRDTTKSILHVVKDLVTIAIVFYCATFIETLPSLALRVPAWITYWIIQGTVMVGPWILAHECGHGAFSKHRRINTIIGWVLHSALLVPYQALAMSHSKHHKGTGSMEKDLVFIPATRSYKGLPAVNFSAGHDEVSEQEHHHHEESIFAETPIYTLGALLFVLTFGWPLYLIVNFSGHEAPHWVNHFQTVAPLYEPHQRKNIFYSNCGIVAMGSILTYLSMVFSPLTVFMYYGIPYLGVNAWIVCITYLQHTDPKVPHFRDNEWNFQRGAACTIDRSFGTIVNHLHHHIGDSHQCHHMFSQMPFYNAVEATKYLKAKLGKYYIFDDTPIAKALYRNWRECKFVEDEGDVVFYKH

SEQ ID NO: 67 - protein, 403 aa, Artificial sequence
  Delta-15 Desaturase
MAPPHVVDEQVRRRIVVEDEIKSKKQFERNYVPMDFTIKEIRDAIPAHLFIRDTTKSILHVVKDLVTIAIVFYCATFIETLPSLALRVPAWITYWIIQGTVMVGPWILAHECGHGAFSKHRRINTIIGWVLHSALLVPYQALAMSHSKHHKGTGSMEKDLVFIPATRSYKGLPAVTNLALHEEVSEQEHHHHEESIFAETPIYTLGALLFVLTFGWPLYLIVNFSGHEAPHWVNHFQTVAPLYEPHQRKNIFYSNCGIVAMGSILTYLSMVFSPLTVFMYYGIPYLGVNAWIVCITYLQHTDPKVPHFRDNEWNFQRGAACTIDRSFGTIVNHLHHHIGDSHQCHHMFSQMPFYNAVEATKYLKAKLGKYYIFDDTPIAKALYRNWRECKFVEDEGDVVFYKH

SEQ ID NO: 68 - protein, 403 aa, Artificial sequence
  Delta-15 Desaturase
MAPPHVVDEQVRRRIVVEDEIKSKKQFERNYVPMDFTIKEIRDAIPAHLFIRDTTKSILHVVKDLVTIAIVFYCATFIETLPSLALRVPAWITYWIIQGTVMVGPWILAHECGHGAFSKHRRINTIIGWVLHSALLVPYQALAMSHSKHHKGTGSMEKDLVFIPATRSYKGLPARADADGEEEVSEQEHHHHEESIFAETPIYTLGALLFVLTFGWPLYLIVNFSGHEAPHWVNHFQTVAPLYEPHQRKNIFYSNCGIVAMGSILTYLSMVFSPLTVFMYYGIPYLGVNAWIVCITYLQHTDPKVPHFRDNEWNFQRGAACTIDRSFGTIVNHLHHHIGDSHQCHHMFSQMPFYNAVEATKYLKAKLGKYYIFDDTPIAKALYRNWRECKFVEDEGDVVFYKH

SEQ ID NO: 69 - protein, 403 aa, Artificial sequence
  Delta-15 Desaturase
MAPPHVVDEQVRRRIVVEDEIKSKKQFERNYVPMDFTIKEIRDAIPAHLFIRDTTKSILHVVKDLVTIAIVFYCATFIETLPSLALRVPAWITYWIIQGTVMVGPWILAHECGHGAFSKHRRINTIIGWVLHSALLVPYQALAMSHSKHHKGTGSMEKDLVFIPATRSYKGLPALSFLAMHDEVSEQEHHHHEESIFAETPIYTLGALLFVLTFGWPLYLIVNFSGHEAPHWVNHFQTVAPLYEPHQRKNIFYSNCGIVAMGSILTYLSMVFSPLTVFMYYGIPYLGVNAWIVCITYLQHTDPKVPHFRDNEWNFQRGAACTIDRSFGTIVNHLHHHIGDSHQCHHMFSQMPFYNAVEATKYLKAKLGKYYIFDDTPIAKALYRNWRECKFVEDEGDVVFYKH

SEQ ID NO: 70 - protein, 403 aa, Artificial sequence
  Delta-15 Desaturase
MAPPHVVDEQVRRRIVVEDEIKSKKQFERNYVPMDFTIKEIRDAIPAHLFIRDTTKSILHVVKDLVTIAIVFYCATFIETLPSLALRVPAWITYWIIQGTVMVGPWILAHECGHGAFSKHRRINTIIGWVLHSALLVPYQALAMSHSKHHKGTGSMEKDLVFIPATRSYKGLPAGSDVSVKEEVSEQEHHHHEESIFAETPIYTLGALLFVLTFGWPLYLIVNFSGHEAPHWVNHFQTVAPLYEPHQRKNIFYSNCGIVAMGSILTYLSMVFSPLTVFMYYGIPYLGVNAWIVCITYLQHTDPKVPHFRDNEWNFQRGAACTIDRSFGTIVNHLHHHIGDSHQCHHMFSQMPFYNAVEATKYLKAKLGKYYIFDDTPIAKALYRNWRECKFVEDEGDVVFYKH

SEQ ID NO: 71 - protein, 403 aa, Artificial sequence
  Delta-15 Desaturase
MAPPHVVDEQVRRRIVVEDEIKSKKQFERNYVPMDFTIKEIRDAIPAHLFIRDTTKSILHVVKDLVTIAIVFYCATFIETLPSLALRVPAWITYWIIQGTVMVGPWILAHECGHGAFSKHRRINTIIGWVLHSALLVPYQALAMSHSKHHKGTGSMEKDLVFIPATRSYKGLPARYILSMNNEVSEQEHHHHEESIFAETPIYTLGALLFVLTFGWPLYLIVNFSGHEAPHWVNHFQTVAPLYEPHQRKNIFYSNCGIVAMGSILTYLSMVFSPLTVFMYYGIPYLGVNAWIVCITYLQHTDPKVPHFRDNEWNFQRGAACTIDRSFGTIVNHLHHHIGDSHQCHHMFSQMPFYNAVEATKYLKAKLGKYYIFDDTPIAKALYRNWRECKFVEDEGDVVFYKH

SEQ ID NO: 72 - protein, 403 aa, Artificial sequence
  Delta-15 Desaturase
MAPPHVVDEQVRRRIVVEDEIKSKKQFERNYVPMDFTIKEIRDAIPAHLFIRDTTKSILHVVKDLVTIAIVFYCATFIETLPSLALRVPAWITYWIIQGTVMVGPWILAHECGHGAFSKHRRINTIIGWVLHSALLVPYQALAMSHSKHHKGTGSMEKDLVFIPATRSYKGLPAGDDLSWKEEVSEQEHHHHEESIFAETPIYTLGALLFVLTFGWPLYLIVNFSGHEAPHWVNHFQTVAPLYEPHQRKNIFYSNCGIVAMGSILTYLSMVFSPLTVFMYYGIPYLGVNAWIVCITYLQHTDPKVPHFRDNEWNFQRGAACTIDRSFGTIVNHLHHHIGDSHQCHHMFSQMPFYNAVEATKYLKAKLGKYYIFDDTPIAKALYRNWRECKFVEDEGDVVFYKH

SEQ ID NO: 73 - protein, 403 aa, Artificial sequence
  Delta-15 Desaturase
MAPPHVVDEQVRRRIVVEDEIKSKKQFERNYVPMDFTIKEIRDAIPAHLFIRDTTKSILHVVKDLVTIAIVFYCATFIETLPSLALRVPAWITYWIIQGTVMVGPWILAHECGHGAFSKHRRINTIIGWVLHSALLVPYQALAMSHSKHHKGTGSMEKDLVFIPATRSYKGLPALYDPSRQKEVSEQEHHHHEESIFAETPIYTLGALLFVLTFGWPLYLIVNFSGHEAPHWVNHFQTVAPLYEPHQRKNIFYSNCGIVAMGSILTYLSMVFSPLTVFMYYGIPYLGVNAWIVCITYLQHTDPKVPHFRDNEWNFQRGAACTIDRSFGTIVNHLHHHIGDSHQCHHMFSQMPFYNAVEATKYLKAKLGKYYIFDDTPIAKALYRNWRECKFVEDEGDVVFYKH

SEQ ID NO: 74 - protein, 403 aa, Artificial sequence
  Delta-15 Desaturase
MAPPHVVDEQVRRRIVVEDEIKSKKQFERNYVPMDFTIKEIRDAIPAHLFIRDTTKSILHVVKDLVTIAIVFYCATFIETLPSLALRVPAWITYWIIQGTVMVGPWILAHECGHGAFSKHRRINTIIGWVLHSALLVPYQALAMSHSKHHKGTGSMEKDLVFIPATRSYKGLPARYFASMHEEVSEQEHHHHEESIFAETPIYTLGALLFVLTFGWPLYLIVNFSGHEAPHWVNHFQTVAPLYEPHQRKNIFYSNCGIVAMGSILTYLSMVFSPLTVFMYYGIPYLGVNAWIVCITYLQHTDPKVPHFRDNEWNFQRGAACTIDRSFGTIVNHLHHHIGDSHQCHHMFSQMPFYNAVEATKYLKAKLGKYYIFDDTPIAKALYRNWRECKFVEDEGDVVFYKH

SEQ ID NO: 75 - protein, 403 aa, Artificial sequence
  Delta-15 Desaturase
MAPPHVVDEQVRRRIVVEDEIKSKKQFERNYVPMDFTIKEIRDAIPAHLFIRDTTKSILHVVKDLVTIAIVFYCATFIETLPSLALRVPAWITYWIIQGTVMVGPWILAHECGHGAFSKHRRINTIIGWVLHSALLVPYQALAMSHSKHHKGTGSMEKDLVFIPATRSYKGLPAGTNPDMQEEVSEQEHHHHEESIFAETPIYTLGALLFVLTFGWPLYLIVNFSGHEAPHWVNHFQTVAPLYEPHQRKNIFYSNCGIVAMGSILTYLSMVFSPLTVFMYYGIPYLGVNAWIVCITYLQHTDPKVPHFRDNEWNFQRGAACTIDRSFGTIVNHLHHHIGDSHQCHHMFSQMPFYNAVEATKYLKAKLGKYYIFDDTPIAKALYRNWRECKFVEDEGDVVFYKH

SEQ ID NO: 76 - protein, 403 aa, Artificial sequence
  Delta-15 Desaturase
MAPPHVVDEQVRRRIVVEDEIKSKKQFERNYVPMDFTIKEIRDAIPAHLFIRDTTKSILHVVKDLVTIAIVFYCATFIETLPSLALRVPAWITYWIIQGTVMVGPWILAHECGHGAFSKHRRINTIIGWVLHSALLVPYQALAMSHSKHHKGTGSMEKDLVFIPATRSYKGLPARSNLDLENEVSEQEHHHHEESIFAETPIYTLGALLFVLTFGWPLYLIVNFSGHEAPHWVNHFQTVAPLYEPHQRKNIFYSNCGIVAMGSILTYLSMVFSPLTVFMYYGIPYLGVNAWIVCITYLQHTDPKVPHFRDNEWNFQRGAACTIDRSFGTIVNHLHHHIGDSHQCHHMFSQMPFYNAVEATKYLKAKLGKYYIFDDTPIAKALYRNWRECKFVEDEGDVVFYKH

SEQ ID NO: 77 - protein, 403 aa, Artificial sequence
  Delta-15 Desaturase
MAPPHVVDEQVRRRIVVENEIKSKKQFERNYVPMDFTIKEIRDAIPAHLFIRDTTKSILHVVKDLVTIAIVFYCATFIETLPSLALRVPAWITYWIIQGTVMVGPWILAHECGHGAFSKHRRINTIIGWVLHSALLVPYQALAMSHSKHHKGTGSMEKDLVFIPATRSYKGLPARSVPDLHNEVSEQEHHHHEESIFAETPIYTLGALLFVLTFGWPLYLIVNFSGHEAPHWVNHFQTVAPLYEPHQRKNIFYSNCGIVAMGSILTYLSMVFSPLTVFMYYGIPYLGVNAWIVCITYLQHTDPKVPHFRDNEWNFQRGAACTIDRSFGTIVNHLHHHIGDSHQCHHMFSQMPFYNAVEATKYLKAKLGKYYIFDDTPIAKALYRNWRECKFVEDEGDVVFYKH

SEQ ID NO: 78 - protein, 403 aa, Artificial sequence
  Delta-15 Desaturase
MAPPHVVDEQVRRRIVVEDEIKSKKQFERNYVPMDFTIKEIRDAIPAHLFIRDTTKSILHVVKDLVTIAIVFYCATFIETLPSLALRVPAWITYWIIQGTVMVGPWILAHECGHGAFSKHRRINTIIGWVLHSALLVPYQALAMSHSKHHKGTGSMEKDLVFIPATRSYKGLPALNFPYLDEEVSEREHHHHEESIFAETPIYTLGALLFVLTFGWPLYLIVNFSGHEAPHWVNHFQTVAPLYEPHQRKNIFYSNCGIVAMGSILTYLSMVFSPLTVFMYYGIPYLGVNAWIVCITYLQHTDPKVPHFRDNEWNFQRGAACTIDRSFGTIVNHLHHHIGDSHQCHHMFSQMPFYNAVEATKYLKAKLGKYYIFDDTPIAKALYRNWRECKFVEDEGDVVFYKH

SEQ ID NO: 79 - protein, 403 aa, Artificial sequence
  Delta-15 Desaturase
MAPPHVVDEQVRRRIVVEDEIKSKKQFERNYVPMDFTIKEIRDAIPAHLFIRDTTKSILHVVKDLVTIAIVFYCATFIETLPSLALRVPAWITYWIIQGTVMVGPWILAHECGHGAFSKHRRINTIIGWVLHSALLVPYQALAMSHSKHHKGTGSMEKDLVFIPATRSYKGLPARNILAVKDEVSEQEHHHHEESIFAETPIYTLGALLFVLTFGWPLYLIVNFSGHEAPHWVNHFQTVAPLYEPHQRKNIFYSNCGIVAMGSILTYLSMVFSPLTVFMYYGIPYLGVNAWIVCITYLQHTDPKVPHFRDNEWNFQRGAACTIDRSFGTIVNHLHHHIGDSHQCHHMFSQMPFYNAVEATKYLKAKLGKYYIFDDTPIAKALYRNWRECKFVEDEGDVVFYKH

SEQ ID NO: 80 - protein, 403 aa, Artificial sequence
  Delta-15 Desaturase
MAPPHVVDEQVRRRIVVEDEIKSKKQFERNYVPMDFTIKEIRDAIPAHLFIRDTTKSILHVVKDLVTIAIVFYCATFIETLPSLALRVPAWITYWIIQGTVMVGPWILAHECGHGAFSKHRRINTIIGWVLHSALLVPYQALAMSHSKHHKGTGSMEKDLVFIPATRSYKGLPAVYFVDLDDEVSEQEHHHHEESIFAETPIYTLGALLFVLTFGWPLYLIVNFSGHEAPHWVNHFQTVAPLYEPHQRKNIFYSNCGIVAMGSILTYLSMVFSPLTVFMYYGIPYLGVNAWIVCITYLQHTDPKVPHFRDNEWNFQRGAACTIDRSFGTIVNHLHHHIGDSHQCHHMFSQMPFYNAVEATKYLKAKLGKYYIFDDTPIAKALYRNWRECKFVEDEGDVVFYKH

SEQ ID NO: 81 - protein, 403 aa, Artificial sequence
  Delta-15 Desaturase
MAPPHVVDEQVRRRIVVEDEIKSKKQFERNYVPMDFTIKEIRDAIPAHLFIRDTTKSILHVVKDLVTIAIVFYCATFIETLPSLALRVPAWITYWIIQGTVMVGPWILAHECGHGAFSKHRRINTIIGWVLHSALLVPYQALAMSHSKHHKGTGSMEKDLVFIPATRSYKGLPARYFPYGNEEVSEQEHHHHEESIFAETPIYTLGALLFVLTFGWPLYLIVNFSGHEAPHWVNHFQTVAPLYEPHQRKNIFYSNCGIVAMGSILTYLSMVFSPLTVFMYYGIPYLGVNAWIVCITYLQHTDPKVPHFRDNEWNFQRGAACTIDRSFGTIVNHLHHHIGDSHQCHHMFSQMPFYNAVEATKYLKAKLGKYYIFDDTPIAKALYRNWRECKFVEDEGDVVFYKH

SEQ ID NO: 82 - protein, 403 aa, Artificial sequence
  Delta-15 Desaturase
MAPPHVVDEQVRRRIVVEDEIKSKKQFERNYVPMDFTIKEIRDAIPAHLFIRDTTKSILHVVKDLVTIAIVFYCATFIETLPSLALRVPAWITYWIIQGTVMVGPWILAHECGHGAFSKHRRINTIIGWVLHSALLVPYQALAMSHSKHHKGTGSMEKDLVFIPATRSYKGLPALNVLYMHKEVSEQEHHHHEESIFAETPIYTLGALLFVLTFGWPLYLIVNFSGHEAPHWVNHFQTVAPLYEPHQRKNIFYSNCGIVAMGSILTYLSMVFSPLTVFMYYGIPYLGVNAWIVCITYLQHTDPKVPHFRDNEWNFQRGAACTIDRSFGTIVNHLHHHIGDSHQCHHMFSQMPFYNAVEATKYLKAKLGKYYIFDDTPIAKALYRNWRECKFVEDEGDVVFYKH

SEQ ID NO: 83 - protein, 403 aa, Artificial sequence
  Delta-15 Desaturase
MAPPHVVDEQVRRRIVVEDEIKSKKQFERNYVPMDFTIKEIRDAIPAHLFIRDTTKSILHVVKDLVTIAIVFYCATFIETLPSLALRVPAWITYWIIQGTVMVGPWILAHECGHGAFSKHRRINTIIGWVLHSALLVPYQALAMSHSKHHKGTGSMEKDLVFIPATRSYKGLPALNYLAWKEEVSEQEHHHHEESIFAETPIYTLGALLFVLTFGWPLYLIVNFSGHEAPHWVNHFQTVAPLYEPHQRKNIFYSNCGIVAMGSILTYLSMVFSPLTVFMYYGIPYLGVNAWIVCITYLQHTDPKVPHFRDNEWNFQRGAACTIDRSFGTIVNHLHHHIGDSHQCHHMFSQMPFYNAVEATKYLKAKLGKYYIFDDTPIAKALYRNWRECKFVEDEGDVVFYKH

SEQ ID NO: 84 - protein, 403 aa, Artificial sequence
  Delta-15 Desaturase
MAPPHVVDEQVRRRIVVEDEIKSKKQFERNYVPMDFTIKEIRDAIPAHLFIRDTTKSILHVVKDLVTIAIVFYCATFIETLPSLALRVPAWITYWIIQGTVMVGPWILAHECGHGAFSKHRRINTIIGWVLHSALLVPYQALAMSHSKHHKGTGSMEKDLVFIPATRSYKGLPARDFLSLHEEVPEQEHHHHEESIFAETPIYTLGALLFVLTFGWPLYLIVNFSGHEAPHWVNHFQTVAPLYEPHQRKNIFYSNCGIVAMGSILTYLSMVFSPLTVFMYYGIPYLGVNAWIVCITYLQHTDPKVPHFRDNEWNFQRGAACTIDRSFGTIVNHLHHHIGDSHQCHHMFSQMPFYNAVEATKYLKAKLGKYYIFDDTPIAKALYRNWRECKFVEDEGDVVFYKH

SEQ ID NO: 85 - protein, 403 aa, Artificial sequence
  Delta-15 Desaturase
MAPPHVVDEQVRRRIVVEDEIKSKKQFERNYVPMDFTIKEIRDAIPAHLFIRDTTKSILHVVKDLVTIAIVFYCATFIETLPSLALRVPAWITYWIIQGTVMVGPWILAHECGHGAFSKHRRINTIIGWVLHSALLVPYQALAMSHSKHHKGTGSMEKDLVFIPATRSYKGLPAGYVASMDNEVSEQEHHHHEESIFAETPIYTLGALLFVLTFGWPLYLIVNFSGHEAPHWVNHFQTVAPLYEPHQRKNIFYSNCGIVAMGSILTYLSMVFSPLTVFMYYGIPYLGVNAWIVCITYLQHTDPKVPHFRDNEWNFQRGAACTIDRSFGTIVNHLHHHIGDSHQCHHMFSQMPFYNAVEATKYLKAKLGKYYIFDDTPIAKALYRNWRECKFVEDEGDVVFYKH

SEQ ID NO: 86 - protein, 403 aa, Artificial sequence
  Delta-15 Desaturase
MAPPHVVDEQVRRRIVVEDEIKSKKQFERNYVPMDFTIKEIRDAIPAHLFIRDTTKSILHVVKDLVTIAIVFYCATFIETLPSLALRVPAWITYWIIQGTVMVGPWILAHECGHGAFSKHRRINTIIGWVLHSALLVPYQALAMSHSKHHKGTGSMEKDLVFIPATRSYKGLPALYVPDMKKEVSEQEHHHHEESIFAETPIYTLGALLFVLTFGWPLYLIVNFSGHEAPHWVNHFQTVAPLYEPHQRKNIFYSNCGIVAMGSILTYLSMVFSPLTVFMYYGIPYLGVNAWIVCITYLQHTDPKVPHFRDNEWNFQRGAACTIDRSFGTIVNHLHHHIGDSHQCHHMFSQMPFYNAVEATKYLKAKLGKYYIFDDTPIAKALYRNWRECKFVEDEGDVVFYKH

SEQ ID NO: 87 - protein, 403 aa, Artificial sequence
  Delta-15 Desaturase
MAPPHVVDEQVRRRIVVEDEIKSKKQFERNYVPMDFTIKEIRDAIPAHLFIRDTTKSILHVVKDLVTIAIVFYCATFIETLPSLALRVPAWITYWIIQGTVMVGPWILAHECGHGAFSKHRRINTIIGWVLHSALLVPYQALAMSHSKHHKGTGSMEKDLVFIPATRSYKGLPALNYPSLENEVSEQEHHHHEESIFAETPIYTLGALLFVLTFGWPLYLIVNFSGHEAPHWVNHFQTVAPLYEPHQRKNIFYSNCGIVAMGSILTYLSMVFSPLTVFMYYGIPYLGVNAWIVCITYLQHTDPKVPHFRDNEWNFQRGAACTIDRSFGTIVNHLHHHIGDSHQCHHMFSQMPFYNAVEATKYLKAKLGKYYIFDDTPIAKALYRNWRECKFVEDEGDVVFYKH

SEQ ID NO: 88 - protein, 403 aa, Artificial sequence
  Delta-15 Desaturase
MAPPHVVDEQVRRRIVVEDEIKSKKQFERNYVPMDFTIKEIRDAIPAHLFIRDTTKSILHVVKDLVTIAIVFYCATFIETLPSLALRVPAWITYWIIQGTVMVGPWILAHECGHGAFSKHRRINTIIGWVLHSALLVPYQALAMSHSKHHKGTGSMEKDLVFIPATRSYKGLPARYFVYGKEEVSEQEHHHHEESIFAETPIYTLGALLFVLTFGWPLYLIVNFSGHEAPHWVNHFQTVAPLYEPHQRKNIFYSNCGIVAMGSILTYLSMVFSPLTVFMYYGIPYLGVNAWIVCITYLQHTDPKVPHFRDNEWNFQRGAACTIDRSFGTIVNHLHHHIGDSHQCHHMFSQMPFYNAVEATKYLKAKLGKYYIFDDTPIAKALYRNWRECKFVEDEGDVVFYKH

SEQ ID NO: 89 - protein, 403 aa, Artificial sequence
  Delta-15 Desaturase
MAPPHVVDEQVRRRIVVEDEIKSKKQFERNYVPMDFTIKEIRDAIPAHLFIRDTTKSILHVVKDLVTIAIVFYCATFIETLPSLALRVPAWITYWIIQGTVMVGPWILAHECGHGAFSKHRRINTIIGWVLHSALLVPYQALAMSHSKHHKGTGSMEKDLVFIPATRSYKGLPAGYNVSWHKEVSEQEHHHHEESIFAETPIYTLGALLFVLTFGWPLYLIVNFSGHEAPHWVNHFQTVAPLYEPHQRKNIFYSNCGIVAMGSILTYLSMVFSPLTVFMYYGIPYLGVNAWIVCITYLQHTDPKVPHFRDNEWNFQRGAACTIDRSFGTIVNHLHHHIGDSHQCHHMFSQMPFYNAVEATKYLKAKLGKYYIFDDTPIAKALYRNWRECKFVEDEGDVVFYKH

SEQ ID NO: 90 - protein, 403 aa, Artificial sequence
  Delta-15 Desaturase
MAPPHVVDEQVRRRIVVEDEIKSKKQFERNYVPMDFTIKEIRDAIPAHLFIRDTTKSILHVVKDLVTIAIVFYCATFIETLPSLALRVPAWITYWIIQGTVMVGPWILAHECGHGAFSKHRRINTIIGWVLHSALLVPYQALAMSHSKHHKGTGSMEKDLVFIPATRSYKGLPARYDVSVQEEVSEQEHHHHEESIFAETPIYTLGALLFVLTFGWPLYLIVNFSGHEAPHWVNHFQTVAPLYEPHQRKNIFYSNCGIVAMGSILTYLSMVFSPLTVFMYYGIPYLGVNAWIVCITYLQHTDPKVPHFRDNEWNFQRGAACTIDRSFGTIVNHLHHHIGDSHQCHHMFSQMPFYNAVEATKYLKAKLGKYYIFDDTPIAKALYRNWRECKFVEDEGDVVFYKH

SEQ ID NO: 91 - protein, 403 aa, Artificial sequence
  Delta-15 Desaturase
MAPPHVVDEQVRRRIVVEDEIKSKKQFERNYVPMDFTIKEIRDAIPAHLFIRDTTKSILHVVKDLVTIAIVFYCATFIETLPSLALRVPAWITYWIIQGTVMVGPWILAHECGHGAFSKHRRINTIIGWVLHSALLVPYQALAMSHSKHHKGTGSMEKDLVFIPATRSYKGLPAVSIAAMNKEVSEQEHHHHEESIFAETPIYTLGALLFVLTFGWPLYLIVNFSGHEAPHWVNHFQTVAPLYEPHQRKNIFYSNCGIVAMGSILTYLSMVFSPLTVFMYYGIPYLGVNAWIVCITYLQHTDPKVPHFRDNEWNFQRGAACTIDRSFGTIVNHLHHHIGDSHQCHHMFSQMPFYNAVEATKYLKAKLGKYYIFDDTPIAKALYRNWRECKFVEDEGDVVFYKH

SEQ ID NO: 92 - protein, 403 aa, Artificial sequence
  Delta-15 Desaturase
MAPPHVVDEQVRRRIVVEDEIKSKKQFERNYVPMDFTIKEIRDAIPAHLFIRDTTKSILHVVKDLVTIAIVFYCATFIETLPSLALRVPAWITYWIIQGTVMVGPWILAHECGHGAFSKHRRINTIIGWVLHSALLVPYQALAMSHSKHHKGTGSMEKDLVFIPATRSYKGLPALTFPAMNKEVSEQEHHHHEESIFAETPIYTLGALLFVLTFGWPLYLIVNFSGHEAPHWVNHFQTVAPLYEPHQRKNIFYSNCGIVAMGSILTYLSMVFSPLTVFMYYGIPYLGVNAWIVCITYLQHTDPKVPHFRDNEWNFQRGAACTIDRSFGTIVNHLHHHIGDSHQCHHMFSQMPFYNAVEATKYLKAKLGKYYIFDDTPIAKALYRNWRECKFVEDEGDVVFYKH

SEQ ID NO: 93 - protein, 403 aa, Artificial sequence
  Delta-15 Desaturase
MAPPHVVDEQVRRRIVVEDEIKSKKQFERNYVPMDFTIKEIRDAIPAHLFIRDTTKSILHVVKDLVTIAIVFYCATFIETLPSLALRVPAWITYWIIQGTVMVGPWILAHECGHGAFSKHRRINTIIGWVLHSALLVPYQALAMSHSKHHKGTGSMEKDLVFIPATRSYKGLPALAFAAGQDEVSEQEHHHHEESIFAETPIYTLGVLLFVLTFGWPLYLIVNFSGHEAPHWVNHFQTVAPLYEPHQRKNIFYSNCGIVAMGSILTYLSMVLSPLTVFMYYGIPYLGVNAWIVCITYLQHTDPKVPHFRDNEWNFQRGAACTIDRSFGTIVNHLHHHIGDSHQCHHMFSQMPFYNAVEATKYLKAKLGKYYIFDDTPIAKALYRNWRECKFVEDEGDVVFYKH

SEQ ID NO: 94 - protein, 403 aa, Artificial sequence
  Delta-15 Desaturase
MAPPHVVDEQVRRRIVVEDEIKSKKQFERNYVPMDFTIKEIRDAIPAHLFIRDTTKSILHVVKDLVTIAIVFYCATFIETLPSLALRVPAWITYWIIQGTVMVGPWILAHECGHGAFSKHRRINTIIGWVLHSALLVPYQALAMSHSKHHKGTGSMEKDLVFIPATRSYKGLPARYNPSMKDEVSEQEHHHHEESIFAETPIYTLGALLFVLTFGWPLYLIVNFSGHEAPHWVNHFQTVAPLYEPHQRKNIFYSNCGIVAMGSILTYLSMVFSPLTVFMYYGIPYLGVNAWIVCITYLQHTDPKVPHFRDNEWNFQRGAACTIDRSFGTIVNHLHHHIGDSHQCHHMFSQMPFYNAVEATKYLKAKLGKYYIFDDTPIAKALYRNWRECKFVEDEGDVVFYKH

SEQ ID NO: 95 - protein, 403 aa, Artificial sequence
  Delta-15 Desaturase
MAPPHVVDEQVRRRIVVEDEIKSKKQFERNYVPMDFTIKEIRDAIPAHLFIRDTTKSILHVVKDLVTIAIVFYCATFIETLPSLALRVPAWITYWIIQGTVMVGPWILAHECGHGAFSKHRRINTIIGWVLHSALLVPYQALAMSHSKHHKGTGSMEKDLVFIPATRSYKGLPAVYFPDVKDEVSEQEHHHHEESIFAETPIYTLGALLFVLTFGWPLYLIVNFSGHEAPHWVNHFQTVAPLYEPHQRKNIFYSNCGIVAMGSILTYLSMVFSPLTVFMYYGIPYLGVNAWIVCITYLQHTDPKVPHFRDNEWNFQRGAACTIDRSFGTIVNHLHHHIGDSHQCHHMFSQMPFYNAVEATKYLKAKLGKYYIFDDTPIAKALYRNWRECKFVEDEGDVVFYKH

SEQ ID NO: 96 - protein, 403 aa, Artificial sequence
  Delta-15 Desaturase
MAPPHVVDEQVRRRIVVEDEIKSKKQFERNYVPMDFTIKEIRDAIPAHLFIRDTTKSILHVVKDLVTIAIVFYCATFIETLPSLALRVPAWITYWIIQGTVMVGPWILAHECGHGAFSKHRRINTIIGWVLHSALLVPYQALAMSHSKHHKGTGSMEKDLVFIPATRSYKGLPARYDLSVKDEVSEQEHHHHEESIFAETPIYTLGALLFVLTFGWPLYLIVNFSGHEAPHWVNHFQTVAPLYEPHQRKNIFYSNCGIVAMGSILTYLSMVFSPLTVFMYYGIPYLGVNAWIVCITYLQHTDPKVPHFRDNEWNFQRGAACTIDRSFGTIVNHLHHHIGDSHQCHHMFSQMPFYNAVEATKYLKAKLGKYYIFDDTPIAKALYRNWRECKFVEDEGDVVFYKH

SEQ ID NO: 97 - protein, 403 aa, Artificial sequence
  Delta-15 Desaturase
MAPPHVVDEQVRRRIVVEDEIKSKKQFERNYVPMDFTIKEIRDAIPAHLFIRDTTKSILHVVKDLVTIAIVFYCATFIETLPSLALRVPAWITYWIIQGTVMVGPWILAHECGHGAFSKHRRINTIIGWVLHSALLVPYQALAMSHSKHHKGTGSMEKDLVFIPATRSYKGLPARDYLAMHKEVSEQEHHHHEESIFAETPIYTLGALLFVLTFGWPLYLIVNFSGHEAPHWVNHFQTVAPLYEPHQRKNIFYSNCGIVAMGSILTYLSMVFSPLTVFMYYGIPYLGVNAWIVCITYLQHTDPKVPHFRDNEWNFQRGAACTIDRSFGTIVNHLHHHIGDSHQCHHMFSQMPFYNAVEATKYLKAKLGKYYIFDDTPIAKALYRNWRECKFVEDEGDVVFYKH

SEQ ID NO: 98 - protein, 403 aa, Artificial sequence
  Delta-15 Desaturase
MAPPHVVDEQVRRRIVVEDEIKSKKQFERNYVPMDFTIKEIRDAIPAHLFIRDTTKSILHVVKDLVTIAIVFYCATFIETLPSLALRVPAWITYWIIQGTVMVGPWILAHECGHGAFSKHRRINTIIGWVLHSALLVPYQALAMSHSKHHKGTGSMEKDLVFIPATRSYKGLPARYIASWDEEVSEQEHHHHEESIFAETPIYTLGALLFVLTFGWPLYLIVNFSGHEAPHWVNHFQTVAPLYEPHQRKNIFYSNCGIVAMGSILTYLSMVFSPLTVFMYYGIPYLGVNAWIVCITYLQHTDPKVPHFRDNEWNFQRGAACTIDRSFGTIVNHLHHHIGDSHQCHHMFSQMPFYNAVEATKYLKAKLGKYYIFDDTPIAKALYRNWRECKFVEDEGDVVFYKH

SEQ ID NO: 99 - protein, 403 aa, Artificial sequence
  Delta-15 Desaturase
MAPPHVVDEQVRRRIVVEDEIKSKKQFERNYVPMDFTIKEIRDAIPAHLFIRDTTKSILHVVKDLVTIAIVFYCATFIETLPSLALRVPAWITYWIIQGTVMVGPWILAHECGHGAFSKHRRINTIIGWVLHSALLVPYQALAMSHSKHHKGTGSMEKDLVFIPATRSYKGLPAVSDVSRDKEVSEQEHHHHEESIFAETPIYTLGALLFVLTFGWPLYLIVNFSGHEAPHWVNHFQTVAPLYEPHQRKNIFYSNCGIVAMGSILTYLSMVFSPLTVFMYYGIPYLGVNAWIVCITYLQHTDPKVPHFRDNEWNFQRGAACTIDRSFGTIVNHLHHHIGDSHQCHHMFSQMPFYNAVEATKYLKAKLGKYYIFDDTPIAKALYRNWRECKFVEDEGDVVFYKH

SEQ ID NO: 100 - protein, 403 aa, Artificial sequence
  Delta-15 Desaturase
MAPPHVVDEQVRRRIVVEDEIKSKKQFERNYVPMDFTIKEIRDAIPAHLFIRDTTKSILHVVKDLVTIAIVFYCATFIETLPSLALRVPAWITYWIIQGTVMVGPWILAHECGHGAFSKHRRINTIIGWVLHSALLVPYQALAMSHSKHHKGTGSMEKDLVFIPATRSYKGLPALAFPYRNDEVSEQEHHHHEESIFAETPIYTLGALLFVLTFGWPLYLIVNFSGHEAPHWVNHFQTVAPLYEPHQRKNIFYSNCGIVAMGSILTYLSMVFSPLTVFMYYGIPYLGVNAWIVCITYLQHTDPKVPHFRDNEWNFQRGAACTIDRSFGTIVNHLHHHIGDSHQCHHMFSQMPFYNAVEATKYLKAKLGKYYIFDDTPIAKALYRNWRECKFVEDEGDVVFYKH

SEQ ID NO: 101 - protein, 403 aa, Artificial sequence
  Delta-15 Desaturase
MAPPHVVDEQVRRRIVVEDEIKSKKQFERNYVPMDFTIKEIRDAIPAHLFIRDTTKSILHVVKDLVTIAIVFYCATFIETLPSLALRVPAWITYWIIQGTVMVGPWILAHECGHGAFSKHRRINTIIGWVLHSALLVPYQALAMSHSKHHKGTGSMEKDLVFIPATRSYKGLPAVSIVDRNEEVSEQEHHHHEESIFAETPIYTLGALLFVLTFGWPLYLIVNFSGHEAPHWVNHFQTVAPLYEPHQRKNIFYSNCGIVAMGSILTYLSMVFSPLTVFMYYGIPYLGVNAWIVCITYLQHTDPKVPHFRDNEWNFQRGAACTIDRSFGTIVNHLHHHIGDSHQCHHMFSQMPFYNAVEATKYLKAKLGKYYIFDDTPIAKALYRNWRECKFVEDEGDVVFYKH

SEQ ID NO: 102 - protein, 403 aa, Artificial sequence
  Delta-15 Desaturase
MAPPHVVDEQVRRRIVVEDEIKSKKQFERNYVPMDFTIKEIRDAIPAHLFIRDTTKSILHVVKDLVTIAIVFYCATFIETLPSLALRVPAWITYWIIQGTVMVGPWILAHECGHGAFSKHRRINTIIGWVLHSALLVPYQALAMSHSKHHKGTGSMEKDLVFIPATRSYKGLPALDYLAMEDQVSEQEHHHHEESIFAETPIYTLGALLFVLTFGWPLYLIVNFSGHEAPHWVNHFQTVAPLYEPHQRKNIFYSNCGIVAMGSILTYLSMVFSPLTVFMYYGIPYLGVNAWIVCITYLQHTDPKVPHFRDNEWNFQRGAACTIDRSFGTIVNHLHHHIGDSHQCHHMFSQMPFYNAVEATKYLKAKLGKYYIFDDTPIAKALYRNWRECKFVEDEGDVVFYKH

SEQ ID NO: 103 - protein, 403 aa, Artificial sequence
  Delta-15 Desaturase
MAPPHVVDEQVRRRIVVEDEIKSKKQFERNYVPMDFTIKEIRDAIPAHLFIRDTTKSILHVVKDLVTIAIVFYCATFIETLPSLALRVPAWITYWIIQGTVMVGPWILAHECGHGAFSKHRRINTIIGWVLHSALLVPYQALAMSHSKHHKGTGSMEKDLVFIPATRSYKGLPALSIAAWDEEVSEQEHHHHEESIFAETPIYTLGALLFVLTFGWPLYLIVNFSGHEAPHWVNHFQTVAPLYEPHQRKNIFYSNCGIVAMGSILTYLSMVFSPLTVFMYYGIPYLGVNAWIVCITYLQHTDPKVPHFRDNEWNFQRGAACTIDRSFGTIVNHLHHHIGDSHQCHHMFSQMPFYNAVEATKYLKAKLGKYYIFDDTPIAKALYRNWRECKFVEDEGDVVFYKH

SEQ ID NO: 104 - protein, 403 aa, Artificial sequence
  Delta-15 Desaturase
MAPPHVVDEQVRRRIVVEDEIKSKKQFERNYVPMDFTIKEIRDAIPAHLFIRDTTKSILHVVKDLVTIAIVFYCATFIETLPSLALRVPAWITYWIIQGTVMVGPWILAHECGHGAFSKHRRINTIIGWVLHSALLVPYQALAMSHSKHHKGTGSMEKDLVFIPATRSYKGLPAGYYPYLEDEVSEQEHHHHEESIFAETPIYTLGALLFVLTFGWPLYLIVNFSGHEAPHWVNHFQTVAPLYEPHQRKNIFYSNCGIVAMGSILTYLSMVFSPLTVFMYYGIPYLGVNAWIVCITYLQHTDPKVPHFRDNEWNFQRGAACTIDRSFGTIVNHLHHHIGDSHQCHHMFSQMPFYNAVEATKYLKAKLGKYYIFDDTPIAKALYRNWRECKFVEDEGDVVFYKH

SEQ ID NO: 105 - protein, 403 aa, Artificial sequence
  Delta-15 Desaturase
MAPPHVVDEQVRRRIVVEDEIKSKKQFERNYVPMDFTIKEIRDAIPAHLFIRDTTKSILHVVKDLVTIAIVFYCATFIETLPSLALRVPAWITYWIIQGTVMVGPWILAHECGHGAFSEPKSFNYIFGWVLHSALLVPYQAWAMSHSKHHKGTGSMTKDVVFIPATRSYKGLPALEKPAVEEEVSEQEHHHHEESIFAETPIYTLGALLFVLTFGWPLYLIVNFSGHEAPHWVNHFQTVAPLYEPHQRKNIFYSNCGIVAMGSILTYLSMVFSPLTVFMYYGIPYLGVNAWIVCITYLQHTDPKVPHFRDNEWNFQRGAACTIDRSFGTIVNHLHHHIGDSHQCHHMFSQMPFYNAVEATKYLKAKLGKYYIFDDTPIAKALYRNWRECKFVEDEGDVVFYKH

SEQ ID NO: 106 - protein, 403 aa, Artificial sequence
  Delta-15 Desaturase
MAPPHVVDEQVRRRIVVEDEIKSKKQFERNYVPMDFTIKEIRDAIPAHLFIRDTTKSILHVVKDLVTIAIVFYCATFIETLPSLALRVPAWITYWIIQGTVMVGPWILAHECGHGAFSDSKTINTIFGWVLHSALLVPYQAWAMSHSKHHKGTGTMTKDVVFIPATRSYKGLPALEKPAVEEEVSEQEHHHHEESIFAETPIYTLGALLFVLTFGWPLYLIVNFSGHEAPHWVNHFQTVAPLYEPHQRKNIFYSNCGIVAMGSILTYLSMVFSPLTVFMYYGIPYLGVNAWIVCITYLQHTDPKVPHFRDNEWNFQRGAACTIDRSFGTIVNHLHHHIGDSHQCHHMFSQMPFYNAVEATKYLKAKLGKYYIFDDTPIAKALYRNWRECKFVEDEGDVVFYKH

SEQ ID NO: 107 - protein, 403 aa, Artificial sequence
  Delta-15 Desaturase
MAPPHVVDEQVRRRIVVEDEIKSKKQFERNYVPMDFTIKEIRDAIPAHLFIRDTTKSILHVVKDLVTIAIVFYCATFIETLPSLALRVPAWITYWIIQGTVMVGPWILAHECGHGAFSDSKTINTIFGWVLHSALLVPYQAWAMSHSKHHKGTGSMKKDLVFIPATRSYKGLPALEKPAVEEEVSEQEHHHHEESIFAETPIYTLGALLFVLTFGWPLYLIVNFSGHEAPHWVNHFQTVAPLYEPHQRKNIFYSNCGIVAMGSILTYLSMVFSPLTVFMYYGIPYLGVNAWIVCITYLQHTDPKVPHFRDNEWNFQRGAACTIDRSFGTIVNHLHHHIGDSHQCHHMFSQMPFYNAVEATKYLKAKLGKYYIFDDTPIAKALYRNWRECKFVEDEGDVVFYKH

SEQ ID NO: 108 - protein, 403 aa, Artificial sequence
  Delta-15 Desaturase
MAPPHVVDEQVRRRIVVEDEIKSKKQFERNYVPMDFTIKEIRDAIPAHLFIRDTTKSILHVVKDLVTIAIVFYCATFIETLPSLALRVPAWITYWIIQGTVMVGPWILAHECGHGAFSDSKTINTIFGWVLHSALLVPYQTWAMSHSKHHKYTGHMTKDVVFIPATRSYKGLPALEKPAVEEEVSEQEHHHHEESIFAETPIYTLGALLFVLTFGWPLYLIVNFSGHEAPHWVNHFQTVAPLYEPHQRKNIFYSNCGIVAMGSILTYLSMVFSPLTVFMYYGIPYLGVNAWIVCITYLQHTDPKVPHFRDNEWNFQRGAACTIDRSFGTIVNHLHHHIGDSHQCHHMFSQMPFYNAVEATKYLKAKLGKYYIFDDTPIAKALYRNWRECKFVEDEGDVVFYKH

SEQ ID NO: 109 - protein, 403 aa, Artificial sequence
  Delta-15 Desaturase
MAPPHVVDEQVRRRIVVEDEIKSKKQFERNYVPMDFTIKEIRDAIPAHLFIRDTTKSILHVVKDLVTIAIVFYCATFIETLPSLALRVPAWITYWIIQGTVMVGPWILAHECGHGAFSDSKTINTIFGWVLHSALLVPYQAWAMSHSKHHKGTGSMKKDFVFIPATRSYKGLPALEKPAVEEEVSEQEHHHHEESIFAETPIYTLGALLFVLTFGWPLYLIVNFSGHEAPHWVNHFQTVAPLYEPHQRKNIFYSNCGIVAMGSILTYLSMVFSPLTVFMYYGIPYLGVNAWIVCITYLQHTDPKVPHFRDNEWNFQRGAACTIDRSFGTIVNHLHHHIGDSHQCHHMFSQMPFYNAVEATKYLKAKLGKYYIFDDTPIAKALYRNWRECKFVEDEGDVVFYKH

SEQ ID NO: 110 - protein, 403 aa, Artificial sequence
  Delta-15 Desaturase
MAPPHVVDEQVRRRIVVEDEIKSKKQFERNYVPMDFTIKEIRDAIPAHLFIRDTTKSILHVVKDLVTIAIVFYCATFIETLPSLALRVPAWITYWIIQGTVMVGPWILAHECGHGAFSDSKTINTIFGWVLHSALLVPYQAWAMSHSKHHKATGHMKKDLVFIPATRSYKGLPALEKPAVEEEVSEQEHHHHEESIFAETPIYTLGALLFVLTFGWPLYLIVNFSGHEAPHWVNHFQTVAPLYEPHQRKNIFYSNCGIVAMGSILTYLSMVFSPLTVFMYYGIPYLGVNAWIVCITYLQHTDPKVPHFRDNEWNFQRGAACTIDRSFGTIVNHLHHHIGDSHQCHHMFSQMPFYNAVEATKYLKAKLGKYYIFDDTPIAKALYRNWRECKFVEDEGDVVFYKH

SEQ ID NO: 111 - protein, 403 aa, Artificial sequence
  Delta-15 Desaturase
MAPPHVVDEQVRRRIVVEDEIKSKKQFERNYVPMDFTIKEIRDAIPAHLFIRDTTKSILHVVKDLVTIAIVFYCATFIETLPSLALRVPAWITYWIIQGTVMVGPWILAHECGHGAFSDSKTINTIFGWVLHSALLVPYQAWAMSHSKHHKYTGTMEKDVVFIPATRSYKGLPALEKPAVEEEVSEQEHHHHEESIFAETPIYTLGALLFVLTFGWPLYLIVNFSGHEAPHWVNHFQTVAPLYEPHQRKNIFYSNCGIVAMGSILTYLSMVFSPLTVFMYYGIPYLGVNAWIVCITYLQHTDPKVPHFRDNEWNFQRGAACTIDRSFGTIVNHLHHHIGDSHQCHHMFSQMPFYNAVEATKYLKAKLGKYYIFDDTPIAKALYRNWRECKFVEDEGDVVFYKH

SEQ ID NO: 112 - protein, 403 aa, Artificial sequence
  Delta-15 Desaturase
MAPPHVVDEQVRRRIVVEDEIKSKKQFERNYVPMDFTIKEIRDAIPAHLFIRDTTKSILHVVKDLVTIAIVFYCATFIETLPSLALRVPAWITYWIIQGTVMVGPWILAHECGHGAFSDSKTINTIFGWVLHSALLVPYQAWAMSHSKHHKDTGHMAKDVVFIPATRSYKGLPALEKPAVEEEVSEQEHHHHEESIFAETPIYTLGALLFVLTFGWPLYLIVNFSGHEAPHWVNHFQTVAPLYEPHQRKNIFYSNCGIVAMGSILTYLSMVFSPLTVFMYYGIPYLGVNAWIVCITYLQHTDPKVPHFRDNEWNFQRGAACTIDRSFGTIVNHLHHHIGDSHQCHHMFSQMPFYNAVEATKYLKAKLGKYYIFDDTPIAKALYRNWRECKFVEDEGDVVFYKH

SEQ ID NO: 113 - protein, 403 aa, Artificial sequence
  Delta-15 Desaturase
MAPPHVVDEQVRRRIVVEDEIKSKKQFERNYVPMDFTIKEIRDAIPAHLFIRDTTKSILHVVKDLVTIAIVFYCATFIETLPSLALRVPAWITYWIIQGTVMVGPWILAHECGHGAFSDSKTINTIFGWVLHSALLVPYQAWAMSHSKHHKGTGSMAKDFVFIPATRSYKGLPALEKPAVEEEVSEQEHHHHEESIFAETPIYTLGALLFVLTFGWPLYLIVNFSGHEAPHWVNHFQTVAPLYEPHQRKNIFYSNCGIVAMGSILTYLSMVFSPLTVFMYYGIPYLGVNAWIVCITYLQHTDPKVPHFRDNEWNFQRGAACTIDRSFGTIVNHLHHHIGDSHQCHHMFSQMPFYNAVEATKYLKAKLGKYYIFDDTPIAKALYRNWRECKFVEDEGDVVFYKH

SEQ ID NO: 114 - protein, 403 aa, Artificial sequence
  Delta-15 Desaturase
MAPPHVVDEQVRRRIVVEDEIKSKKQFERNYVPMDFTIKEIRDAIPAHLFIRDTTKSILHVVKDLVTIAIVFYCATFIETLPSLALRVPAWITYWIIQGTVMVGPWILAHECGHGAFSDSKTINTIFGWVLHSALLVPYQAWAMSHSKHHKSTGDMKKDLVFIPATRSYKGLPALEKPAVEEEVSEQEHHHHEESIFAETPIYTLGALLFVLTFGWPLYLIVNFSGHEAPHWVNHFQTVAPLYEPHQRKNIFYSNCGIVAMGSILTYLSMVFSPLTVFMYYGIPYLGVNAWIVCITYLQHTDPKVPHFRDNEWNFQRGAACTIDRSFGTIVNHLHHHIGDSHQCHHMFSQMPFYNAVEATKYLKAKLGKYYIFDDTPIAKALYRNWRECKFVEDEGDVVFYKH

SEQ ID NO: 115 - protein, 403 aa, Artificial sequence
  Delta-15 Desaturase
MAPPHVVDEQVRRRIVVEDEIKSKKQFERNYVPMDFTIKEIRDAIPAHLFIRDTTKSILHVVKDLVTIAIVFYCATFIETLPSLALRVPAWITYWIIQGTVMVGPWILAHECGHGAFSDSKTINTIFGWVLHSALLVPYQAWAMSHSKHHKFTGNMSKDLVFIPATRSYKGLPALEKPAVEEEVSEQEHHHHEESIFAETPIYTLGALLFVLTFGWPLYLIVNFSGHEAPHWVNHFQTVAPLYEPHQRKNIFYSNCGIVAMGSILTYLSMVFSPLTVFMYYGIPYLGVNAWIVCITYLQHTDPKVPHFRDNEWNFQRGAACTIDRSFGTIVNHLHHHIGDSHQCHHMFSQMPFYNAVEATKYLKAKLGKYYIFDDTPIAKALYRNWRECKFVEDEGDVVFYKH

SEQ ID NO: 116 - protein, 403 aa, Artificial sequence
  Delta-15 Desaturase
MAPPHVVDEQVRRRIVVEDEIKSKKQFERNYVPMDFTIKEIRDAIPAHLFIRDTTKSILHVVKDLVTIAIVFYCATFIETLPSLALRVPAWITYWIIQGTVMVGPWILAHECGHGAFSDSKTINTIFGWVLHSALLVPYQAWAMSHSKHHKYTGNMTKDIVFIPATRSYKGLPALEKPAVEEEVSEQEHHHHEESIFAETPIYTLGALLFVLTFGWPLYLIVNFSGHEAPHWVNHFQTVAPLYEPHQRKNIFYSNCGIVAMGSILTYLSMVFSPLTVFMYYGIPYLGVNAWIVCITYLQHTDPKVPHFRDNEWNFQRGAACTIDRSFGTIVNHLHHHIGDSHQCHHMFSQMPFYNAVEATKYLKAKLGKYYIFDDTPIAKALYRNWRECKFVEDEGDVVFYKH

SEQ ID NO: 117 - protein, 403 aa, Artificial sequence
  Delta-15 Desaturase
MAPPHVVDEQVRRRIVVEDEIKSKKQFERNYVPMDFTIKEIRDAIPAHLFIRDTTKSILHVVKDLVTIAIVFYCATFIETLPSLALRVPAWITYWIIQGTVMVGPWILAHECGHGAFSDSKTINTIFGWVLHSALLVPYQAWAMSHSKHHKDTGSMTKDIVFIPATRSYKGLPALEKPAVEEEVSEQEHHHHEESIFAETPIYTLGALLFVLTFGWPLYLIVNFSGHEAPHWVNHFQTVAPLYEPHQRKNIFYSNCGIVAMGSILTYLSMVFSPLTVFMYYGIPYLGVNAWIVCITYLQHTDPKVPHFRDNEWNFQRGAACTIDRSFGTIVNHLHHHIGDSHQCHHMFSQMPFYNAVEATKYLKAKLGKYYIFDDTPIAKALYRNWRECKFVEDEGDVVFYKH

SEQ ID NO: 118 - protein, 403 aa, Artificial sequence
  Delta-15 Desaturase
MAPPHVVDEQVRRRIVVEDEIKSKKQFERNYVPMDFTIKEIRDAIPAHLFIRDTTKSILHVVKDLVTIAIVFYCATFIETLPSLALRVPAWITYWIIQGTVMVGPWILAHECGHGAFSDSKTINTIFGWVLHSALLVPYQAWAMSHSKHHKSTGAMSKDVVFIPATRSYKGLPALEKPAVEEEVSEQEHHHHEESIFAETPIYTLGALLFVLTFGWPLYLIVNFSGHEAPHWVNHFQTVAPLYEPHQRKNIFYSNCGIVAMGSILTYLSMVFSPLTVFMYYGIPYLGVNAWIVCITYLQHTDPKVPHFRDNEWNFQRGAACTIDRSFGTIVNHLHHHIGDSHQCHHMFSQMPFYNAVEATKYLKAKLGKYYIFDDTPIAKALYRNWRECKFVEDEGDVVFYKH

SEQ ID NO: 119 - protein, 403 aa, Artificial sequence
  Delta-15 Desaturase
MAPPHVVDEQVRRRIVVEDEIKSKKQFERNYVPMDFTIKEIRDAIPAHLFIRDTTKSILHVVKDLVTIAIVFYCATFIETLPSLALRVPAWITYWIIQGTVMVGPWILAHECGHGAFSDSKTINTIFGWVLHSALLVPYQAWAMSHSKHHKFTGAMSKDVVFIPATRSYKGLPALEKPAVEEEVSEQEHHHHEESIFAETPIYTLGALLFVLTFGWPLYLIVNFSGHEAPHWVNHFQTVAPLYEPHQRKNIFYSNCGIVAMGSILTYLSMVFSPLTVFMYYGIPYLGVNAWIVCITYLQHTDPKVPHFRDNEWNFQRGAACTIDRSFGTIVNHLHHHIGDSHQCHHMFSQMPFYNAVEATKYLKAKLGKYYIFDDTPIAKALYRNWRECKFVEDEGDVVFYKH

SEQ ID NO: 120 - protein, 403 aa, Artificial sequence
  Delta-15 Desaturase
MAPPHVVDEQVRRRIVVEDEIKSKKQFERNYVPMDFTIKEIRDAIPAHLFIRDTTKSILHVVKDLVTIAIVFYCATFIETLPSLALRVPAWITYWIIQGTVMVGPWILAHECGHGAFSDSKTINTIFGWVLHSALLVPYQAWAMSHSKHHKFTGSMTKDVVFIPATRSYKGLPALEKPAVEEEVSEQEHHHHEESIFAETPIYTLGALLFVLTFGWPLYLIVNFSGHEAPHWVNHFQTVAPLYEPHQRKNIFYSNCGIVAMGSILTYLSMVFSPLTVFMYYGIPYLGVNAWIVCITYLQHTDPKVPHFRDNEWNFQRGAACTIDRSFGTIVNHLHHHIGDSHQCHHMFSQMPFYNAVEATKYLKAKLGKYYIFDDTPIAKALYRNWRECKFVEDEGDVVFYKH

SEQ ID NO: 121 - protein, 403 aa, Artificial sequence
  Delta-15 Desaturase
MAPPHVVDEQVRRRIVVEDEIKSKKQFERNYVPMDFTIKEIRDAIPAHLFIRDTTKSILHVVKDLVTIAIVFYCATFIETLPSLALRVPAWITYWIIQGTVMVGPWILAHECGHGAFSDSKTINTIFGWVLHSALLVPYQAWAMSHSKHHKFTGAMTKDVVFIPATRSYKGLPALEKPAVEEEVSEQEHHHHEESIFAETPIYTLGALLFVLTFGWPLYLIVNFSGHEAPHWVNHFQTVAPLYEPHQRKNIFYSNCGIVAMGSILTYLSMVFSPLTVFMYYGIPYLGVNAWIVCITYLQHTDPKVPHFRDNEWNFQRGAACTIDRSFGTIVNHLHHHIGDSHQCHHMFSQMPFYNAVEATKYLKAKLGKYYIFDDTPIAKALYRNWRECKFVEDEGDVVFYKH

SEQ ID NO: 122 - protein, 403 aa, Artificial sequence
  Delta-15 Desaturase
MAPPHVVDEQVRRRIVVEDEIKSKKQFERNYVPMDFTIKEIRDAIPAHLFIRDTTKSILHVVKDLVTIAIVFYCATFIETLPSLALRVPAWITYWIIQGTVMVGPWILAHECGHGAFSDSKTINTIFGWVLHSALLVPYQAWAMSHSKHHKGTGSMEKDLVFIPATRSYKGLPALEKPAVEEEVSEQEHHHHEESIFAETPIYTLGALLFVLTFGWPLYLIVNFSGHEAPHWVNHFQTVAPLYEPHQRKNIFYSNCGIVAMGSILTYLSMVFSPLTVFMYYGIPYLGVNAWIVCITYLQHTDPKVPHFRDNEWNFQRGAACTIDRSFGTIVNHLHHHIGDSHQCHHMFSQMPFYNAVEATKYLKAKLGKYYIFDDTPIAKALYRNWRECKFVEDEGDVVFYKH

SEQ ID NO: 123 - protein, 403 aa, Artificial sequence
  Delta-15 Desaturase
MAPPHVVDEQVRRRIVVEDEIKSKKQFERNYVPMDFTIKEIRDAIPAHLFIRDTTKSILHVVKDLVTIAIVFYCATFIETLPSLALRVPAWITYWIIQGTVMVGPWILAHECGHGAFSDSKTINTIFGWVLHSALLVPYQAWAMSHSKHHKGTGSMEKDFVFIPATRSYKGLPALEKPAVEEEVSEQEHHHHEESIFAETPIYTLGALLFVLTFGWPLYLIVNFSGHEAPHWVNHFQTVAPLYEPHQRKNIFYSNCGIVAMGSILTYLSMVFSPLTVFMYYGIPYLGVNAWIVCITYLQHTDPKVPHFRDNEWNFQRGAACTIDRSFGTIVNHLHHHIGDSHQCHHMFSQMPFYNAVEATKYLKAKLGKYYIFDDTPIAKALYRNWRECKFVEDEGDVVFYKH

SEQ ID NO: 124 - protein, 403 aa, Artificial sequence; identical to SEQ ID NO: 107
  Delta-15 Desaturase

SEQ ID NO: 125 - protein, 403 aa, Artificial sequence; identical to SEQ ID NO: 113
  Delta-15 Desaturase

SEQ ID NO: 126 - protein, 403 aa, Artificial sequence
  Delta-15 Desaturase
MAPPHVVDEQVRRRIVVEDEIKSKKQFERNYVPMDFTIKEIRDAIPAHLFIRDTTKSILHVVKDLVTIAIVFYCATFIETLPSLALRVPAWITYWIIQGTVMVGPWILAHECGHGAFSDSKTINTIFGWVLHSALLVPYQAWAMSHSKHHKGTGSMSKDFVFIPATRSYKGLPALEKPAVEEEVSEQEHHHHEESIFAETPIYTLGALLFVLTFGWPLYLIVNFSGHEAPHWVNHFQTVAPLYEPHQRKNIFYSNCGIVAMGSILTYLSMVFSPLTVFMYYGIPYLGVNAWIVCITYLQHTDPKVPHFRDNEWNFQRGAACTIDRSFGTIVNHLHHHIGDSHQCHHMFSQMPFYNAVEATKYLKAKLGKYYIFDDTPIAKALYRNWRECKFVEDEGDVVFYKH

SEQ ID NO: 127 - protein, 403 aa, Artificial sequence; identical to SEQ ID NO: 107
  Delta-15 Desaturase

SEQ ID NO: 128 - protein, 403 aa, Artificial sequence
  Delta-15 Desaturase
MAPPHVVDEQVRRRIVVEDEIKSKKQFERNYVPMDFTIKEIRDAIPAHLFIRDTTKSILHVVKDLVTIAIVFYCATFIETLPSLALRVPAWITYWIIQGTVMVGPWILAHECGHGAFSDSKTINTIFGWVLHSALLVPYQAWAMSHSKHHKGTGSMKKDMVFIPATRSYKCLPALEKPAVEEEVSEQEHHHHEESIFAETPIYTLGALLFVLTFGWPLYLIVNFSGHEAPHWVNHFQTVAPLYEPHQRKNIFYSNCGIVAMGSILTYLSMVFSPLTVFMYYGIPYLGVNAWIVCITYLQHTDPKVPHFRDNEWNFQRGAACTIDRSFGTIVNHLHHHIGDSHQCHHMFSQMPFYNAVEATKYLKAKLGKYYIFDDTPIAKALYRNWRECKFVEDEGDVVFYKH

SEQ ID NO: 129 - protein, 403 aa, Artificial sequence
  Delta-15 Desaturase
MAPPHVVDEQVRRRIVVEDEIKSKKQFERNYVPMDFTIKEIRDAIPAHLFIRDTTKSILHVVKDLVTIAIVFYCATFIETLPSLALRVPAWITYWIIQGTVMVGPWILAHECGHGAFSDSKTINTIFGWVLHSALLVPYQAWAMSHSKHHKGTGSMAKDVVFIPATRSYKGLPALEKPAVEEEVSEQEHHHHEESIFAETPIYTLGALLFVLTFGWPLYLIVNFSGHEAPHWVNHFQTVAPLYEPHQRKNIFYSNCGIVAMGSILTYLSMVFSPLTVFMYYGIPYLGVNAWIVCITYLQHTDPKVPHFRDNEWNFQRGAACTIDRSFGTIVNHLHHHIGDSHQCHHMFSQMPFYNAVEATKYLKAKLGKYYIFDDTPIAKALYRNWRECKFVEDEGDVVFYKH

SEQ ID NO: 130 - protein, 403 aa, Artificial sequence
  Delta-15 Desaturase
MAPPHVVDEQVRRRIVVEDEIKSKKQFERNYVPMDFTIKEIRDAIPAHLFIRDTTKSILHVVKDLVTIAIVFYCATFIETLPSLALRVPAWITYWIIQGTVMVGPWILAHECGHGAFSDSKTINTIFGWVLHSALLVPYQAWAMSHSKHHKGTGSMTKDLVFIPATRSYKGLPALEKPAVEEEVSEQEHHHHEESIFAETPIYTLGALLFVLTFGWPLYLIVNFSGHEAPHWVNHFQTVAPLYEPHQRKNIFYSNCGIVAMGSILTYLSMVFSPLTVFMYYGIPYLGVNAWIVCITYLQHTDPKVPHFRDNEWNFQRGAACTIDRSFGTIVNHLHHHIGDSHQCHHMFSQMPFYNAVEATKYLKAKLGKYYIFDDTPIAKALYRNWRECKFVEDEGDVVFYKH

SEQ ID NO: 131 - protein, 403 aa, Artificial sequence
  Delta-15 Desaturase
MAPPHVVDEQVRRRIVVEDEIKSKKQFERNYVPMDFTIKEIRDAIPAHLFIRDTTKSILHVVKDLVTIAIVFYCATFIETLPSLALRVPAWITYWIIQGTVMVGPWILAHECGHGAFSDSKTINTIFGWVLHSALLVPYQAWAMSHSKHHKGTGSMEKDIVFIPATRSYKGLPALEKPAVEEEVSEQEHHHHEESIFAETPIYTLGALLFVLTFGWPLYLIVNFSGHEAPHWVNHFQTVAPLYEPHQRKNIFYSNCGIVAMGSILTYLSMVFSPLTVFMYYGIPYLGVNAWIVCITYLQHTDPKVPHFRDNEWNFQRGAACTIDRSFGTIVNHLHHHIGDSHQCHHMFSQMPFYNAVEATKYLKAKLGKYYIFDDTPIAKALYRNWRECKFVEDEGDVVFYKH

SEQ ID NO: 132 - protein, 403 aa, Artificial sequence
  Delta-15 Desaturase
MAPPHVVDEQVRRRIVVEDEIKSKKQFERNYVPMDFTIKEIRDAIPAHLFIRDTTKSILHVVKDLVTIAIVFYCATFIETLPSLALRVPAWITYWIIQGTVMVGPWILAHECGHGAFSDSKTINTIFGWVLHSALLVPYQAWAMSHSKHHKGTGSMKKDIVFIPATRSYKGLPALEKPAVEEEVSEQEHHHHEESIFAETPIYTLGALLFVLTFGWPLYLIVNFSGHEAPHWVNHFQTVAPLYEPHQRKNIFYSNCGIVAMGSILTYLSMVFSPLTVFMYYGIPYLGVNAWIVCITYLQHTDPKVPHFRDNEWNFQRGAACTIDRSFGTIVNHLHHHIGDSHQCHHMFSQMPFYNAVEATKYLKAKLGKYYIFDDTPIAKALYRNWRECKFVEDEGDVVFYKH

SEQ ID NO: 133 - protein, 403 aa, Artificial sequence; identical to SEQ ID NO: 130
  Delta-15 Desaturase

SEQ ID NO: 134 - protein, 403 aa, Artificial sequence; identical to SEQ ID NO: 126
  Delta-15 Desaturase

SEQ ID NO: 135 - protein, 403 aa, Artificial sequence
  Delta-15 Desaturase
MAPPHVVDEQVRRRIVVEDEIKSKKQFERNYVPMDFTIKEIRDAIPAHLFIRDTTKSILHVVKDLVTIAIVFYCATFIETLPSLALRVPAWITYWIIQGTVMVGPWILAHECGHGAFSDSKTINTIFGWVLHSALLVPYQAWAMSHSKHHKGTGSMTKDMVFIPATRSYKGLPALEKPAVEEEVSEQEHHHHEESIFAETPIYTLGALLFVLTFGWPLYLIVNFSGHEAPHWVNHFQTVAPLYEPHQRKNIFYSNCGIVAMGSILTYLSMVFSPLTVFMYYGIPYLGVNAWIVCITYLQHTDPKVPHFRDNEWNFQRGAACTIDRSFGTIVNHLHHHIGDSHQCHHMFSQMPFYNAVEATKYLKAKLGKYYIFDDTPIAKALYRNWRECKFVEDEGDVVFYKH

SEQ ID NO: 136 - protein, 403 aa, Artificial sequence
  Delta-15 Desaturase
MAPPHVVDEQVRRRIVVEDEIKSKKQFERNYVPMDFTIKEIRDAIPAHLFIRDTTKSILHVVKDLVTIAIVFYCATFIETLPSLALRVPAWITYWIIQGTVMVGPWILAHECGHGAFSDSKTINTIFGWVLHSALLVPYQAWAMSHSKHHKGTGSMAKDLVFIPATRSYKGLPALEKPAVEEEVSEQEHHHHEESIFAETPIYTLGALLFVLTFGWPLYLIVNFSGHEAPHWVNHFQTVAPLYEPHQRKNIFYSNCGIVAMGSILTYLSMVFSPLTVFMYYGIPYLGVNAWIVCITYLQHTDPKVPHFRDNEWNFQRGAACTIDRSFGTIVNHLHHHIGDSHQCHHMFSQMPFYNAVEATKYLKAKLGKYYIFDDTPIAKALYRNWRECKFVEDEGDVVFYKH

SEQ ID NO: 137 - protein, 403 aa, Artificial sequence
  Delta-15 Desaturase
MAPPHVVDEQVRRRIVVEDEIKSKKQFERNYVPMDFTIKEIRDAIPAHLFIRDTTKSILHVVKDLVTIAIVFYCATFIETLPSLALRVPAWITYWIIQGTVMVGPWILAHECGHGAFSDSKTINTIFGWVLHSALLVPYQAWAMSHSKHHKGTGSMEKDVVFIPATRSYKGLPALEKPAVEEEVSEQEHHHHEESIFAETPIYTLGALLFVLTFGWPLYLIVNFSGHEAPHWVNHFQTVAPLYEPHQRKNIFYSNCGIVAMGSILTYLSMVFSPLTVFMYYGIPYLGVNAWIVCITYLQHTDPKVPHFRDNEWNFQRGAACTIDRSFGTIVNHLHHHIGDSHQCHHMFSQMPFYNAVEATKYLKAKLGKYYIFDDTPIAKALYRNWRECKFVEDEGDVVFYKH

SEQ ID NO: 138 - protein, 403 aa, Artificial sequence
  Delta-15 Desaturase
MAPPHVVDEQVRRRIVVEDEIKSKKQFERNYVPMDFTIKEIRDAIPAHLFIRDTTKSILHVVKDLVTIAIVFYCATFIETLPSLALRVPAWITYWIIQGTVMVGPWILAHECGHGAFSDSKTINTIFGWVLHSALLVPYQAWAMSHSKHHKGTGSMSKDVVFIPATRSYKGLPALEKPAVEEEVSEQEHHHHEESIFAETPIYTLGALLFVLTFGWPLYLIVNFSGHEAPHWVNHFQTVAPLYEPHQRKNIFYSNCGIVAMGSILTYLSMVFSPLTVFMYYGIPYLGVNAWIVCITYLQHTDPKVPHFRDNEWNFQRGAACTIDRSFGTIVNHLHHHIGDSHQCHHMFSQMPFYNAVEATKYLKAKLGKYYIFDDTPIAKALYRNWRECKFVEDEGDVVFYKH

SEQ ID NO: 139 - protein, 403 aa, Artificial sequence; identical to SEQ ID NO: 122
  Delta-15 Desaturase

SEQ ID NO: 140 - protein, 403 aa, Artificial sequence
  Delta-15 Desaturase
MAPPHVVDEQVRRRIVVEDEIKSKKQFERNYVPMDFTIKEIRDAIPAHLFIRDTTKSILHVVKDLVTIAIVFYCATFIETLPSLALRVPAWITYWIIQGTVMVGPWILAHECGHGAFSEPKSFNYIIGWVLHSALLVPYQAWAMSHSKHHKGTGSMTKDVVFIPATRSYKGLPALEKPAVEEEVSEQEHHHHEESIFAETPIYTLGALLFVLTFGWPLYLIVNFSGHEAPHWVNHFQTVAPLYEPHQRKNIFYSNCGIVAMGSILTYLSMVFSPLTVFMYYGIPYLGVNAWIVCITYLQHTDPKVPHFRDNEWNFQRGAACTIDRSFGTIVNHLHHHIGDSHQCHHMFSQMPFYNAVEATKYLKAKLGKYYIFDDTPIAKALYRNWRECKFVEDEGDVVFYKH

SEQ ID NO: 141 - protein, 403 aa, Artificial sequence
  Delta-15 Desaturase
MAPPHVVDEQVRRRIVVEDEIKSKKQFERNYVPMDFTIKEIRDAIPAHLFIRDTTKSILHVVKDLVTIAIVFYCATFIETLPSLALRVPAWITYWIIQGTVMVGPWILAHECGHGAFSKPKTFNTILGWVLHSALLVPYQAWAMSHSKHHKGTGSMTKDVVFIPATRSYKGLPALEKPAVEEEVSEQEHHHHEESIFAETPIYTLGALLFVLTFGWPLYLIVNFSGHEAPHWVNHFQTVAPLYEPHQRKNIFYSNCGIVAMGSILTYLSMVFSPLTVFMYYGIPYLGVNAWIVCITYLQHTDPKVPHFRDNEWNFQRGAACTIDRSFGTIVNHLHHHIGDSHQCHHMFSQMPFYNAVEATKYLKAKLGKYYIFDDTPIAKALYRNWRECKFVEDEGDVVFYKH

SEQ ID NO: 142 - protein, 403 aa, Artificial sequence
  Delta-15 Desaturase
MAPPHVVDEQVRRRIVVEDEIKSKKQFERNYVPMDFTIKEIRDAIPAHLFIRDTTKSILHVVKDLVTIAIVFYCATFIETLPSLALRVPAWITYWIIQGTVMVGPWILAHECGHGAFSDPRSFNNILGWVLHSALLVPYQAWAMSHSKHHKGTGSMTKDVVFIPATRSYKGLPALEKPAVEEEVSEQEHHHHEESIFAETPIYTLGALLFVLTFGWPLYLIVNFSGHEAPHWVNHFQTVAPLYEPHQRKNIFYSNCGIVAMGSILTYLSMVFSPLTVFMYYGIPYLGVNAWIVCITYLQHTDPKVPHFRDNEWNFQRGAACTIDRSFGTIVNHLHHHIGDSHQCHHMFSQMPFYNAVEATKYLKAKLGKYYIFDDTPIAKALYRNWRECKFVEDEGDVVFYKH

SEQ ID NO: 143 - protein, 403 aa, Artificial sequence
  Delta-15 Desaturase
MAPPHVVDEQVRRRIVVEDEIKSKKQFERNYVPMDFTIKEIRDAIPAHLFIRDTTKSILHVVKDLVTIAIVFYCATFIETLPSLALRVPAWITYWIIQGTVMVGPWILAHECGHGAFSHPRRINSIMGWVLHSALLVPYQAWAMSHSKHHKGTGSMTKDVVFIPATRSYKGLPALEKPAVEEEVSEQEHHHHEESIFAETPIYTLGALLFVLTFGWPLYLIVNFSGHEAPHWVNHFQTVAPLYEPHQRKNIFYSNCGIVAMGSILTYLSMVFSPLTVFMYYGIPYLGVNAWIVCITYLQHTDPKVPHFRDNEWNFQRGAACTIDRSFGTIVNHLHHHIGDSHQCHHMFSQMPFYNAVEATKYLKAKLGKYYIFDDTPIAKALYRNWRECKFVEDEGDVVFYKH

SEQ ID NO: 144 - protein, 403 aa, Artificial sequence
  Delta-15 Desaturase
MAPPHVVDEQVRRRIVVEDEIKSKKQFERNYVPMDFTIKEIRDAIPAHLFIRDTTKSILHVVKDLVTIAIVFYCATFIETLPSLALRVPAWITYWIIQGTVMVGPWILAHECGHGAFSDSKTINTIFGWVLHSALLVPYQAWAMSHSKHHKVTGHMTKDVVFIPATRSYKGLPALEKPAVEEEVSEQEHHHHEESIFAETPIYTLGALLFVLTFGWPLYLIVNFSGHEAPHWVNHFQTVAPLYEPHQRKNIFYSNCGIVAMGSILTYLSMVFSPLTVFMYYGIPYLGVNAWIVCITYLQHTDPKVPHFRDNEWNFQRGAACTIDRSFGTIVNHLHHHIGDSHQCHHMFSQMPFYNAVEATKYLKAKLGKYYIFDDTPIAKALYRNWRECKFVEDEGDVVFYKH

SEQ ID NO: 145 - protein, 403 aa, Artificial sequence
  Delta-15 Desaturase
MAPPHVVDEQVRRRIVVEDEIKSKKQFERNYVPMDFTIKEIRDAIPAHLFIRDTTKSILHVVKDLVTIAIVFYCATFIETLPSLALRVPAWITYWIIQGTVMVGPWILAHECGHGAFSDSKTINTIFGWVLHSALLVPYQAWAMSHSKHHKCTGRMTKDVVFIPATRSYKGLPALEKPAVEEEVSEQEHHHHEESIFAETPIYTLGALLFVLTFGWPLYLIVNFSGHEAPHWVNHFQTVAPLYEPHQRKNIFYSNCGIVAMGSILTYLSMVFSPLTVFMYYGIPYLGVNAWIVCITYLQHTDPKVPHFRDNEWNFQRGAACTIDRSFGTIVNHLHHHIGDSHQCHHMFSQMPFYNAVEATKYLKAKLGKYYIFDDTPIAKALYRNWRECKFVEDEGDVVFYKH

SEQ ID NO: 146 - protein, 403 aa, Artificial sequence
  Delta-15 Desaturase
MAPPHVVDEQVRRRIVVEDEIKSKKQFERNYVPMDFTIKEIRDAIPAHLFIRDTTKSILHVVKDLVTIAIVFYCATFIETLPSLALRVPAWITYWIIQGTVMVGPWILAHECGHGAFSDSKTINTIFGWVLHSALLVPYQAWAMSHSKHHKFTGTMTKDVVFIPATRSYKGLPALEKPAVEEEVSEQEHHHHEESIFAETPIYTLGALLFVLTFGWPLYLIVNFSGHEAPHWVNHFQTVAPLYEPHQRKNIFYSNCGIVAMGSILTYLSMVFSPLTVFMYYGIPYLGVNAWIVCITYLQHTDPKVPHFRDNEWNFQRGAACTIDRSFGTIVNHLHHHIGDSHQCHHMFSQMPFYNAVEATKYLKAKLGKYYIFDDTPIAKALYRNWRECKFVEDEGDVVFYKH

SEQ ID NO: 147 - protein, 403 aa, Artificial sequence
  Delta-15 Desaturase
MAPPHVVDEQVRRRIVVEDEIKSKKQFERNYVPMDFTIKEIRDAIPAHLFIRDTTKSILHVVKDLVTIAIVFYCATFIETLPSLALRVPAWITYWIIQGTVMVGPWILAHECGHGAFSDSKTINTIFGWVLHSALLVPYQAWAMSHSKHHKYTGAMTKDVVFIPATRSYKGLPALEKPAVEEEVSEQEHHHHEESIFAETPIYTLGALLFVLTFGWPLYLIVNFSGHEAPHWVNHFQTVAPLYEPHQRKNIFYSNCGIVAMGSILTYLSMVFSPLTVFMYYGIPYLGVNAWIVCITYLQHTDPKVPHFRDNEWNFQRGAACTIDRSFGTIVNHLHHHIGDSHQCHHMFSQMPFYNAVEATKYLKAKLGKYYIFDDTPIAKALYRNWRECKFVEDEGDVVFYKH

SEQ ID NO: 148 - protein, 403 aa, Artificial sequence
  Delta-15 Desaturase
MAPPHVVDEQVRRRIVVEDEIKSKKQFERNYVPMDFTIKEIRDAIPAHLFIRDTTKSILHVVKDLVTIAIVFYCATFIETLPSLALRVPAWITYWIIQGTVMVGPWILAHECGHGAFSDSKTINTIFGWVLHSALLVPYQAWAMSHSKHHKYTGTMTKDVVFIPATRSYKGLPALEKPAVEEEVSEQEHHHHEESIFAETPIYTLGALLFVLTFGWPLYLIVNFSGHEAPHWVNHFQTVAPLYEPHQRKNIFYSNCGIVAMGSILTYLSMVFSPLTVFMYYGIPYLGVNAWIVCITYLQHTDPKVPHFRDNEWNFQRGAACTIDRSFGTIVNHLHHHIGDSHQCHHMFSQMPFYNAVEATKYLKAKLGKYYIFDDTPIAKALYRNWRECKFVEDEGDVVFYKH

SEQ ID NO: 149 - protein, 403 aa, Artificial sequence; identical to SEQ ID NO: 121
  Delta-15 Desaturase

SEQ ID NO: 150 - protein, 403 aa, Artificial sequence
  Delta-15 Desaturase
MAPPHVVDEQVRRRIVVEDEIKSKKQFERNYVPMDFTIKEIRDAIPAHLFIRDTTKSILHVVKDLVTIAIVFYCATFIETLPSLALRVPAWITYWIIQGTVMVGPWILAHECGHGAFSDSKTINTIFGWVLHSALLVPYQAWAMSHSKHHKCTGPMTKDVVFIPATRSYKGLPALEKPAVEEEVSEQEHHHHEESIFAETPIYTLGALLFVLTFGWPLYLIVNFSGHEAPHWVNHFQTVAPLYEPHQRKNIFYSNCGIVAMGSILTYLSMVFSPLTVFMYYGIPYLGVNAWIVCITYLQHTDPKVPHFRDNEWNFQRGAACTIDRSFGTIVNHLHHHIGDSHQCHHMFSQMPFYNAVEATKYLKAKLGKYYIFDDTPIAKALYRNWRECKFVEDEGDVVFYKH

SEQ ID NO: 151 - protein, 403 aa, Artificial sequence
  Delta-15 Desaturase
MAPPHVVDEQVRRRIVVEDEIKSKKQFERNYVPMDFTIKEIRDAIPAHLFIRDTTKSILHVVKDLVTIAIVFYCATFIETLPSLALRVPAWITYWIIQGTVMVGPWILAHECGHGAFSDSKTINTIFGWVLHSALLVPYQAWAMSHSKHHKDTGHMTKDVVFIPATRSYKGLPALEKPAVEEEVSEQEHHHHEESIFAETPIYTLGALLFVLTFGWPLYLIVNFSGHEAPHWVNHFQTVAPLYEPHQRKNIFYSNCGIVAMGSILTYLSMVFSPLTVFMYYGIPYLGVNAWIVCITYLQHTDPKVPHFRDNEWNFQRGAACTIDRSFGTIVNHLHHHIGDSHQCHHMFSQMPFYNAVEATKYLKAKLGKYYIFDDTPIAKALYRNWRECKFVEDEGDVVFYKH

SEQ ID NO: 152 - protein, 403 aa, Artificial sequence
  Delta-15 Desaturase
MAPPHVVDEQVRRRIVVEDEIKSKKQFERNYVPMDFTIKEIRDAIPAHLFIRDTTKSILHVVKDLVTIAIVFYCATFIETLPSLALRVPAWITYWIIQGTVMVGPWILAHECGHGAFSEPKWFNYILGWVLHSALLVPYQAWAMSHSKHHKGTGSMTKDVVFIPATRSYKGLPALEKPAVEEEVSEQEHHHHEESIFAETPIYTLGALLFVLTFGWPLYLIVNFSGHEAPHWVNHFQTVAPLYEPHQRKNIFYSNCGIVAMGSILTYLSMVFSPLTVFMYYGIPYLGVNAWIVCITYLQHTDPKVPHFRDNEWNFQRGAACTIDRSFGTIVNHLHHHIGDSHQCHHMFSQMPFYNAVEATKYLKAKLGKYYIFDDTPIAKALYRNWRECKFVEDEGDVVFYKH

SEQ ID NO: 153 - protein, 403 aa, Artificial sequence
  Delta-15 Desaturase
MAPPHVVDEQVRRRIVVEDEIKSKKQFERNYVPMDFTIKEIRDAIPAHLFIRDTTKSILHVVKDLVTIAIVFYCATFIETLPSLALRVPAWITYWIIQGTVMVGPWILAHECGHGAFSEPKTFNYILGWVLHSALLVPYQAWAMSHSKHHKGTGSMTKDVVFIPATRSYKGLPALEKPAVEEEVSEQEHHHHEESIFAETPIYTLGALLFVLTFGWPLYLIVNFSGHEAPHWVNHFQTVAPLYEPHQRKNIFYSNCGIVAMGSILTYLSMVFSPLTVFMYYGIPYLGVNAWIVCITYLQHTDPKVPHFRDNEWNFQRGAACTIDRSFGTIVNHLHHHIGDSHQCHHMFSQMPFYNAVEATKYLKAKLGKYYIFDDTPIAKALYRNWRECKFVEDEGDVVFYKH

SEQ ID NO: 154 - protein, 403 aa, Artificial sequence
  Delta-15 Desaturase
MAPPHVVDEQVRRRIVVEDEIKSKKQFERNYVPMDFTIKEIRDAIPAHLFIRDTTKSILHVVKDLVTIAIVFYCATFIETLPSLALRVPAWITYWIIQGTVMVGPWILAHECGHGAFSQPKSFNYIIGWVLHSALLVPYQAWAMSHSKHHKGTGSMTKDVVFIPATRSYKGLPALEKPAVEEEVSEQEHHHHEESIFAETPIYTLGALLFVLTFGWPLYLIVNFSGHEAPHWVNHFQTVAPLYEPHQRKNIFYSNCGIVAMGSILTYLSMVFSPLTVFMYYGIPYLGVNAWIVCITYLQHTDPKVPHFRDNEWNFQRGAACTIDRSFGTIVNHLHHHIGDSHQCHHMFSQMPFYNAVEATKYLKAKLGKYYIFDDTPIAKALYRNWRECKFVEDEGDVVFYKH

SEQ ID NO: 155 - protein, 403 aa, Artificial sequence
  Delta-15 Desaturase
MAPPHVVDEQVRRRIVVEDEIKSKKQFERNYVPMDFTIKEIRDAIPAHLFIRDTTKSILHVVKDLVTIAIVFYCATFIETLPSLALRVPAWITYWIIQGTVMVGPWILAHECGHGAFSHPKRFNNIFGWVLHSALLVPYQAWAMSHSKHHKGTGSMTKDVVFIPATRSYKGLPALEKPAVEEEVSEQEHHHHEESIFAETPIYTLGALLFVLTFGWPLYLIVNFSGHEAPHWVNHFQTVAPLYEPHQRKNIFYSNCGIVAMGSILTYLSMVFSPLTVFMYYGIPYLGVNAWIVCITYLQHTDPKVPHFRDNEWNFQRGAACTIDRSFGTIVNHLHHHIGDSHQCHHMFSQMPFYNAVEATKYLKAKLGKYYIFDDTPIAKALYRNWRECKFVEDEGDVVFYKH

SEQ ID NO: 156 - protein, 403 aa, Artificial sequence
  Delta-15 Desaturase
MAPPHVVDEQVRRRIVVEDEIKSKKQFERNYVPMDFTIKEIRDAIPAHLFIRDTTKSILHVVKDLVTIAIVFYCATFIETLPSLALRVPAWITYWIIQGTVMVGPWILAHECGHGAFSEPKSFNSILGWVLHSALLVPYQAWAMSHSKHHKGTGSMTKDVVFIPATRSYKGLPALEKPAVEEEVSEQEHHHHEESIFAETPIYTLGALLFVLTFGWPLYLIVNFSGHEAPHWVNHFQTVAPLYEPHQRKNIFYSNCGIVAMGSILTYLSMVFSPLTVFMYYGIPYLGVNAWIVCITYLQHTDPKVPHFRDNEWNFQRGAACTIDRSFGTIVNHLHHHIGDSHQCHHMFSQMPFYNAVEATKYLKAKLGKYYIFDDTPIAKALYRNWRECKFVEDEGDVVFYKH

SEQ ID NO: 157 - protein, 403 aa, Artificial sequence
  Delta-15 Desaturase
MAPPHVVDEQVRRRIVVEDEIKSKKQFERNYVPMDFTIKEIRDAIPAHLFIRDTTKSILHVVKDLVTIAIVFYCATFIETLPSLALRVPAWITYWIIQGTVMVGPWILAHECGHGAFSEPKTFNYIIGWVLHSALLVPYQAWAMSHSKHHKGTGSMTKDVVFIPATRSYKGLPALEKPAVEEEVSEQEHHHHEESIFAETPIYTLGALLFVLTFGWPLYLIVNFSGHEAPHWVNHFQTVAPLYEPHQRKNIFYSNCGIVAMGSILTYLSMVFSPLTVFMYYGIPYLGVNAWIVCITYLQHTDPKVPHFRDNEWNFQRGAACTIDRSFGTIVNHLHHHIGDSHQCHHMFSQMPFYNAVEATKYLKAKLGKYYIFDDTPIAKALYRNWRECKFVEDEGDVVFYKH

SEQ ID NO: 158 - protein, 403 aa, Artificial sequence
  Delta-15 Desaturase
MAPPHVVDEQVRRRIVVEDEIKSKKQFERNYVPMDFTIKEIRDAIPAHLFIRDTTKSILHVVKDLVTIAIVFYCATFIETLPSLALRVPAWITYWIIQGTVMVGPWILAHECGHGAFSDPKSFNYIMGWVLHSALLVPYQAWAMSHSKHHKGTGSMTKDVVFIPATRSYKGLPALEKPAVEEEVSEQEHHHHEESIFAETPIYTLGALLFVLTFGWPLYLIVNFSGHEAPHWVNHFQTVAPLYEPHQRKNIFYSNCGIVAMGSILTYLSMVFSPLTVFMYYGIPYLGVNAWIVCITYLQHTDPKVPHFRDNEWNFQRGAACTIDRSFGTIVNHLHHHIGDSHQCHHMFSQMPFYNAVEATKYLKAKLGKYYIFDDTPIAKALYRNWRECKFVEDEGDVVFYKH

SEQ ID NO: 159 - protein, 403 aa, Artificial sequence
  Delta-15 Desaturase
MAPPHVVDEQVRRRIVVEDEIKSKKQFERNYVPMDFTIKEIRDAIPAHLFIRDTTKSILHVVKDLVTIAIVFYCATFIETLPSLALRVPAWITYWIIQGTVMVGPWILAHECGHGAFSEPKRFNSILGWVLHSALLVPYQAWAMSHSKHHKGTGSMTKDVVFIPATRSYKGLPALEKPAVEEEVSEQEHHHHEESIFAETPIYTLGALLFVLTFGWPLYLIVNFSGHEAPHWVNHFQTVAPLYEPHQRKNIFYSNCGIVAMGSILTYLSMVFSPLTVFMYYGIPYLGVNAWIVCITYLQHTDPKVPHFRDNEWNFQRGAACTIDRSFGTIVNHLHHHIGDSHQCHHMFSQMPFYNAVEATKYLKAKLGKYYIFDDTPIAKALYRNWRECKFVEDEGDVVFYKH

SEQ ID NO: 160 - protein, 403 aa, Artificial sequence
  Delta-15 Desaturase
MAPPHVVDEQVRRRIVVEDEIKSKKQFERNYVPMDFTIKEIRDAIPAHLFIRDTTKSILHVVKDLVTIAIVFYCATFIETLPSLALRVPAWITYWIIQGTVMVGPWILAHECGHGAFSHPKSFNYIIGWVLHSALLVPYQAWAMSHSKHHKGTGSMTKDVVFIPATRSYKGLPALEKPAVEEEVSEQEHHHHEESIFAETPIYTLGALLFVLTFGWPLYLIVNFSGHEAPHWVNHFQTVAPLYEPHQRKNIFYSNCGIVAMGSILTYLSMVFSPLTVFMYYGIPYLGVNAWIVCITYLQHTDPKVPHFRDNEWNFQRGAACTIDRSFGTIVNHLHHHIGDSHQCHHMFSQMPFYNAVEATKYLKAKLGKYYIFDDTPIAKALYRNWRECKFVEDEGDVVFYKH

SEQ ID NO: 161 - protein, 403 aa, Artificial sequence
  Delta-15 Desaturase
MAPPHVVDEQVRRRIVVEDEIKSKKQFERNYVPMDFTIKEIRDAIPAHLFIRDTTKSILHVVKDLVTIAIVFYCATFIETLPSLALRVPAWITYWIIQGTVMVGPWILAHECGHGAFSHPKSFNNIIGWVLHSALLVPYQAWAMSHSKHHKGTGSMTKDVVFIPATRSYKGLPALEKPAVEEEVSEQEHHHHEESIFAETPIYTLGALLFVLTFGWPLYLIVNFSGHEAPHWVNHFQTVAPLYEPHQRKNIFYSNCGIVAMGSILTYLSMVFSPLTVFMYYGIPYLGVNAWIVCITYLQHTDPKVPHFRDNEWNFQRGAACTIDRSFGTIVNHLHHHIGDSHQCHHMFSQMPFYNAVEATKYLKAKLGKYYIFDDTPIAKALYRNWRECKFVEDEGDVVFYKH

SEQ ID NO: 162 - protein, 403 aa, Artificial sequence
  Delta-15 Desaturase
MAPPHVVDEQVRRRIVVEDEIKSKKQFERNYVPMDFTIKEIRDAIPAHLFIRDTTKSILHVVKDLVTIAIVFYCATFIETLPSLALRVPAWITYWIIQGTVMVGPWILAHECGHGAFSEPKTFNSILGWVLHSALLVPYQAWAMSHSKHHKGTGSMTKDVVFIPATRSYKGLPALEKPAVEEEVSEQEHHHHEESIFAETPIYTLGALLFVLTFGWPLYLIVNFSGHEAPHWVNHFQTVAPLYEPHQRKNIFYSNCGIVAMGSILTYLSMVFSPLTVFMYYGIPYLGVNAWIVCITYLQHTDPKVPHFRDNEWNFQRGAACTIDRSFGTIVNHLHHHIGDSHQCHHMFSQMPFYNAVEATKYLKAKLGKYYIFDDTPIAKALYRNWRECKFVEDEGDVVFYKH

SEQ ID NO: 163 - protein, 403 aa, Artificial sequence
  Delta-15 Desaturase
MAPPHVVDEQVRRRIVVEDEIKSKKQFERNYVPMDFTIKEIRDAIPAHLFIRDTTKSILHVVKDLVTIAIVFYCATFIETLPSLALRVPAWITYWIIQGTVMVGPWILAHECGHGAFSNSTRFNYIMGWVLHSALLVPYQAWAMSHSKHHKGTGSMTKDVVFIPATRSYKGLPALEKPAVEEEVSEQEHHHHEESIFAETPIYTLGALLFVLTFGWPLYLIVNFSGHEAPHWVNHFQTVAPLYEPHQRKNIFYSNCGIVAMGSILTYLSMVFSPLTVFMYYGIPYLGVNAWIVCITYLQHTDPKVPHFRDNEWNFQRGAACTIDRSFGTIVNHLHHHIGDSHQCHHMFSQMPFYNAVEATKYLKAKLGKYYIFDDTPIAKALYRNWRECKFVEDEGDVVFYKH

SEQ ID NO: 164 - protein, 403 aa, Artificial sequence
  Delta-15 Desaturase
MAPPHVVDEQVRRRIVVEDEIKSKKQFERNYVPMDFTIKEIRDAIPAHLFIRDTTKSILHVVKDLVTIAIVFYCATFIETLPSLALRVPAWITYWIIQGTVMVGPWILAHECGHGAFSKPKRFNYIMGWVLHSALLVPYQAWAMSHSKHHKGTGSMTKDVVFIPATRSYKGLPALEKPAVEEEVSEQEHHHHEESIFAETPIYTLGALLFVLTFGWPLYLIVNFSGHEAPHWVNHFQTVAPLYEPHQRKNIFYSNCGIVAMGSILTYLSMVFSPLTVFMYYGIPYLGVNAWIVCITYLQHTDPKVPHFRDNEWNFQRGAACTIDRSFGTIVNHLHHHIGDSHQCHHMFSQMPFYNAVEATKYLKAKLGKYYIFDDTPIAKALYRNWRECKFVEDEGDVVFYKH

SEQ ID NO: 165 - protein, 403 aa, Artificial sequence
  Delta-15 Desaturase
MAPPHVVDEQVRRRIVVEDEIKSKKQFERNYVPMDFTIKEIRDAIPAHLFIRDTTKSILHVVKDLVTIAIVFYCATFIETLPSLALRVPAWITYWIIQGTVMVGPWILAHECGHGAFSESKWFNNIFGWVLHSALLVPYQAWAMSHSKHHKDTGSMTKDVVFIPATRSYKGLPALEKPAVEEEVSEQEHHHHEESIFAETPIYTLGALLFVLTFGWPLYLIVNFSGHEAPHWVNHFQTVAPLYEPHQRKNIFYSNCGIVAMGSILTYLSMVFSPLTVFMYYGIPYLGVNAWIVCITYLQHTDPKVPHFRDNEWNFQRGAACTIDRSFGTIVNHLHHHIGDSHQCHHMFSQMPFYNAVEATKYLKAKLGKYYIFDDTPIAKALYRNWRECKFVEDEGDVVFYKH

SEQ ID NO: 166 - protein, 403 aa, Artificial sequence
  Delta-15 Desaturase
MAPPHVVDEQVRRRIVVEDEIKSKKQFERNYVPMDFTIKEIRDAIPAHLFIRDTTKSILHVVKDLVTIAIVFYCATFIETLPSLALRVPAWITYWIIQGTVMVGPWILAHECGHGAFSDPTRFNYIMGWVLHSALLVPYQAWAMSHSKHHKGTGSMTKDVVFIPATRSYKGLPALEKPAVEEEVSEQEHHHHEESIFAETPIYTLGALLFVLTFGWPLYLIVNFSGHEAPHWVNHFQTVAPLYEPHQRKNIFYSNCGIVAMGSILTYLSMVFSPLTVFMYYGIPYLGVNAWIVCITYLQHTDPKVPHFRDNEWNFQRGAACTIDRSFGTIVNHLHHHIGDSHQCHHMFSQMPFYNAVEATKYLKAKLGKYYIFDDTPIAKALYRNWRECKFVEDEGDVVFYKH

SEQ ID NO: 167 - protein, 403 aa, Artificial sequence
  Delta-15 Desaturase
MAPPHVVDEQVRRRIVVEDEIKSKKQFERNYVPMDFTIKEIRDAIPAHLFIRDTTKSILHVVKDLVTIAIVFYCATFIETLPSLALRVPAWITYWIIQGTVMVGPWILAHECGHGAFSNPTRFNYIMGWVLHSALLVPYQAWAMSHSKHHKGTGSMTKDVVFIPATRSYKGLPALEKPAVEEEVSEQEHHHHEESIFAETPIYTLGALLFVLTFGWPLYLIVNFSGHEAPHWVNHFQTVAPLYEPHQRKNIFYSNCGIVAMGSILTYLSMVFSPLTVFMYYGIPYLGVNAWIVCITYLQHTDPKVPHFRDNEWNFQRGAACTIDRSFGTIVNHLHHHIGDSHQCHHMFSQMPFYNAVEATKYLKAKLGKYYIFDDTPIAKALYRNWRECKFVEDEGDVVFYKH

SEQ ID NO: 168 - protein, 403 aa, Artificial sequence
  Delta-15 Desaturase
MAPPHVVDEQVRRRIVVEDEIKSKKQFERNYVPMDFTIKEIRDAIPAHLFIRDTTKSILHVVKDLVTIAIVFYCATFIETLPSLALRVPAWITYWIIQGTVMVGPWILAHECGHGAFSKPRSFNYIFGWVLHSALLVPYQAWAMSHSKHHKGTGSMTKDVVFIPATRSYKGLPALEKPAVEEEVSEQEHHHHEESIFAETPIYTLGALLFVLTFGWPLYLIVNFSGHEAPHWVNHFQTVAPLYEPHQRKNIFYSNCGIVAMGSILTYLSMVFSPLTVFMYYGIPYLGVNAWIVCITYLQHTDPKVPHFRDNEWNFQRGAACTIDRSFGTIVNHLHHHIGDSHQCHHMFSQMPFYNAVEATKYLKAKLGKYYIFDDTPIAKALYRNWRECKFVEDEGDVVFYKH

SEQ ID NO: 169 - protein, 403 aa, Artificial sequence
  Delta-15 Desaturase
MAPPHVVDEQVRRRIVVEDEIKSKKQFERNYVPMDFTIKEIRDAIPAHLFIRDTTKSILHVVKDLVTIAIVFYCATFIETLPSLALRVPAWITYWIIQGTVMVGPWILAHECGHGAFSHSTTFNSIIGWVLHSALLVPYQAWAMSHSKHHKGTGAMTKDIVFIPATRSYKGLPALEKPAVEEEVSEQEHHHHEESIFAETPIYTLGALLFVLTFGWPLYLIVNFSGHEAPHWVNHFQTVAPLYEPHQRKNIFYSNCGIVAMGSILTYLSMVFSPLTVFMYYGIPYLGVNAWIVCITYLQHTDPKVPHFRDNEWNFQRGAACTIDRSFGTIVNHLHHHIGDSHQCHHMFSQMPFYNAVEATKYLKAKLGKYYIFDDTPIAKALYRNWRECKFVEDEGDVVFYKH

SEQ ID NO: 170 - protein, 403 aa, Artificial sequence
  Delta-15 Desaturase
MAPPHVVDEQVRRRIVVEDEIKSKKQFERNYVPMDFTIKEIRDAIPAHLFIRDTTKSILHVVKDLVTIAIVFYCATFIETLPSLALRVPAWITYWIIQGTVMVGPWILAHECGHGAFSKHRTFNYIIGWVLHSALLVPYQAWAMSHSKHHKCTGSMTKDIVFIPATRSYKGLPALEKPAVEEEVSEQEHHHHEESIFAETPIYTLGALLFVLTFGWPLYLIVNFSGHEAPHWVNHFQTVAPLYEPHQRKNIFYSNCGIVAMGSILTYLSMVFSPLTVFMYYGIPYLGVNAWIVCITYLQHTDPKVPHFRDNEWNFQRGAACTIDRSFGTIVNHLHHHIGDSHQCHHMFSQMPFYNAVEATKYLKAKLGKYYIFDDTPIAKALYRNWRECKFVEDEGDVVFYKH

SEQ ID NO: 171 - protein, 403 aa, Artificial sequence
  Delta-15 Desaturase
MAPPHVVDEQVRRRIVVEDEIKSKKQFERNYVPMDFTIKEIRDAIPAHLFIRDTTKSILHVVKDLVTIAIVFYCATFIETLPSLALRVPAWITYWIIQGTVMVGPWILAHECGHGAFSKYKWINTILGWVLHSALLVPYQAWAMSHSKHHKCTGAMAKDVVFIPATRSYKGLPALEKPAVEEEVSEQEHHHHEESIFAETPIYTLGALLFVLTFGWPLYLIVNFSGHEAPHWVNHFQTVAPLYEPHQRKNIFYSNCGIVAMGSILTYLSMVFSPLTVFMYYGIPYLGVNAWIVCITYLQHTDPKVPHFRDNEWNFQRGAACTIDRSFGTIVNHLHHHIGDSHQCHHMFSQMPFYNAVEATKYLKAKLGKYYIFDDTPIAKALYRNWRECKFVEDEGDVVFYKH

SEQ ID NO: 172 - protein, 403 aa, Artificial sequence
  Delta-15 Desaturase
MAPPHVVDEQVRRRIVVEDEIKSKKQFERNYVPMDFTIKEIRDAIPAHLFIRDTTKSILHVVKDLVTIAIVFYCATFIETLPSLALRVPAWITYWIIQGTVMVGPWILAHECGHGAFSHPRTINYIIGWVLHSALLVPYQAWAMSHSKHHKGTGSMTKDVVFIPATRSYKGLPALEKPAVEEEVSEQEHHHHEESIFAETPIYTLGALLFVLTFGWPLYLIVNFSGHEAPHWVNHFQTVAPLYEPHQRKNIFYSNCGIVAMGSILTYLSMVFSPLTVFMYYGIPYLGVNAWIVCITYLQHTDPKVPHFRDNEWNFQRGAACTIDRSFGTIVNHLHHHIGDSHQCHHMFSQMPFYNAVEATKYLKAKLGKYYIFDDTPIAKALYRNWRECKFVEDEGDVVFYKH

SEQ ID NO: 173 - protein, 403 aa, Artificial sequence
  Delta-15 Desaturase
MAPPHVVDEQVRRRIVVEDEIKSKKQFERNYVPMDFTIKEIRDAIPAHLFIRDTTKSILHVVKDLVTIAIVFYCATFIETLPSLALRVPAWITYWIIQGTVMVGPWILAHECGHGAFSKYRSINYIIGWVLHSALLVPYQAWAMSHSKHHKGTGSMTKDVVFIPATRSYKGLPALEKPAVEEEVSEQEHHHHEESIFAETPIYTLGALLFVLTFGWPLYLIVNFSGHEAPHWVNHFQTVAPLYEPHQRKNIFYSNCGIVAMGSILTYLSMVFSPLTVFMYYGIPYLGVNAWIVCITYLQHTDPKVPHFRDNEWNFQRGAACTIDRSFGTIVNHLHHHIGDSHQCHHMFSQMPFYNAVEATKYLKAKLGKYYIFDDTPIAKALYRNWRECKFVEDEGDVVFYKH

SEQ ID NO: 174 - protein, 403 aa, Artificial sequence
  Delta-15 Desaturase
MAPPHVVDEQVRRRIVVEDEIKSKKQFERNYVPMDFTIKEIRDAIPAHLFIRDTTKSILHVVKDLVTIAIVFYCATFIETLPSLALRVPAWITYWIIQGTVMVGPWILAHECGHGAFSQHTRINSILGWVLHSALLVPYQAWAMSHSKHHKGTGSMTKDVVFIPATRSYKGLPALEKPAVEEEVSEQEHHHHEESIFAETPIYTLGALLFVLTFGWPLYLIVNFSGHEAPHWVNHFQTVAPLYEPHQRKNIFYSNCGIVAMGSILTYLSMVFSPLTVFMYYGIPYLGVNAWIVCITYLQHTDPKVPHFRDNEWNFQRGAACTIDRSFGTIVNHLHHHIGDSHQCHHMFSQMPFYNAVEATKYLKAKLGKYYIFDDTPIAKALYRNWRECKFVEDEGDVVFYKH

SEQ ID NO: 175 - protein, 403 aa, Artificial sequence
  Delta-15 Desaturase
MAPPHVVDEQVRRRIVVEDEIKSKKQFERNYVPMDFTIKEIRDAIPAHLFIRDTTKSILHVVKDLVTIAIVFYCATFIETLPSLALRVPAWITYWIIQGTVMVGPWILAHECGHGAFSNPTSFNNIMGWVLHSALLVPYQAWAMSHSKHHKGTGSMTKDVVFIPATRSYKGLPALEKPAVEEEVSEQEHHHHEESIFAETPIYTLGALLFVLTFGWPLYLIVNFSGHEAPHWVNHFQTVAPLYEPHQRKNIFYSNCGIVAMGSILTYLSMVFSPLTVFMYYGIPYLGVNAWIVCITYLQHTDPKVPHFRDNEWNFQRGAACTIDRSFGTIVNHLHHHIGDSHQCHHMFSQMPFYNAVEATKYLKAKLGKYYIFDDTPIAKALYRNWRECKFVEDEGDVVFYKH

SEQ ID NO: 176 - protein, 403 aa, Artificial sequence
  Delta-15 Desaturase
MAPPHVVDEQVRRRIVVEDEIKSKKQFERNYVPMDFTIKEIRDAIPAHLFIRDTTKSILHVVKDLVTIAIVFYCATFIETLPSLALRVPAWITYWIIQGTVMVGPWILAHECGHGAFSQYTSFNTIIGWVLHSALLVPYQAWAMSHSKHHKDTGSMTKDVVFIPATRSYKGLPALEKPAVEEEVSEQEHHHHEESIFAETPIYTLGALLFVLTFGWPLYLIVNFSGHEAPHWVNHFQTVAPLYEPHQRKNIFYSNCGIVAMGSILTYLSMVFSPLTVFMYYGIPYLGVNAWIVCITYLQHTDPKVPHFRDNEWNFQRGAACTIDRSFGTIVNHLHHHIGDSHQCHHMFSQMPFYNAVEATKYLKAKLGKYYIFDDTPIAKALYRNWRECKFVEDEGDVVFYKH

SEQ ID NO: 177 - protein, 403 aa, Artificial sequence
  Delta-15 Desaturase
MAPPHVVDEQVRRRIVVEDEIKSKKQFERNYVPMDFTIKEIRDAIPAHLFIRDTTKSILHVVKDLVTIAIVFYCATFIETLPSLALRVPAWITYWIIQGTVMVGPWILAHECGHGAFSNHTSFNSIFGWVLHSALLVPYQAWAMSHSKHHKCTGSMTKDVVFIPATRSYKGLPALEKPAVEEEVSEQEHHHHEESIFAETPIYTLGALLFVLTFGWPLYLIVNFSGHEAPHWVNHFQTVAPLYEPHQRKNIFYSNCGIVAMGSILTYLSMVFSPLTVFMYYGIPYLGVNAWIVCITYLQHTDPKVPHFRDNEWNFQRGAACTIDRSFGTIVNHLHHHIGDSHQCHHMFSQMPFYNAVEATKYLKAKLGKYYIFDDTPIAKALYRNWRECKFVEDEGDVVFYKH

SEQ ID NO: 178 - protein, 403 aa, Artificial sequence
  Delta-15 Desaturase
MAPPHVVDEQVRRRIVVEDEIKSKKQFERNYVPMDFTIKEIRDAIPAHLFIRDTTKSILHVVKDLVTIAIVFYCATFIETLPSLALRVPAWITYWIIQGTVMVGPWILAHECGHGAFSQPRWFNYIIGWVLHSALLVPYQAWAMSHSKHHKGTGSMTKDVVFIPATRSYKGLPALEKPAVEEEVSEQEHHHHEESIFAETPIYTLGALLFVLTFGWPLYLIVNFSGHEAPHWVNHFQTVAPLYEPHQRKNIFYSNCGIVAMGSILTYLSMVFSPLTVFMYYGIPYLGVNAWIVCITYLQHTDPKVPHFRDNEWNFQRGAACTIDRSFGTIVNHLHHHIGDSHQCHHMFSQMPFYNAVEATKYLKAKLGKYYIFDDTPIAKALYRNWRECKFVEDEGDVVFYKH

SEQ ID NO: 179 - protein, 403 aa, Artificial sequence
  Delta-15 Desaturase
MAPPHVVDEQVRRRIVVEDEIKSKKQFERNYVPMDFTIKEIRDAIPAHLFIRDTTKSILHVVKDLVTIAIVFYCATFIETLPSLALRVPAWITYWIIQGTVMVGPWILAHECGHGAFSQPTWINYIIGWVLHSALLVPYQAWAMSHSKHHKGTGSMTKDVVFIPATRSYKGLPALEKPAVEEEVSEQEHHHHEESIFAETPIYTLGALLFVLTFGWPLYLIVNFSGHEAPHWVNHFQTVAPLYEPHQRKNIFYSNCGIVAMGSILTYLSMVFSPLTVFMYYGIPYLGVNAWIVCITYLQHTDPKVPHFRDNEWNFQRGAACTIDRSFGTIVNHLHHHIGDSHQCHHMFSQMPFYNAVEATKYLKAKLGKYYIFDDTPIAKALYRNWRECKFVEDEGDVVFYKH

SEQ ID NO: 180 - protein, 403 aa, Artificial sequence
  Delta-15 Desaturase
MAPPHVVDEQVRRRIVVEDEIKSKKQFERNYVPMDFTIKEIRDAIPAHLFIRDTTKSILHVVKDLVTIAIVFYCATFIETLPSLALRVPAWITYWIIQGTVMVGPWILAHECGHGAFSKPKRINYILGWVLHSALLVPYQAWAMSHSKHHKGTGSMTKDVVFIPATRSYKGLPALEKPAVEEEVSEQEHHHHEESIFAETPIYTLGALLFVLTFGWPLYLIVNFSGHEAPHWVNHFQTVAPLYEPHQRKNIFYSNCGIVAMGSILTYLSMVFSPLTVFMYYGIPYLGVNAWIVCITYLQHTDPKVPHFRDNEWNFQRGAACTIDRSFGTIVNHLHHHIGDSHQCHHMFSQMPFYNAVEATKYLKAKLGKYYIFDDTPIAKALYRNWRECKFVEDEGDVVFYKH

SEQ ID NO: 181 - protein, 403 aa, Artificial sequence
  Delta-15 Desaturase
MAPPHVVDEQVRRRIVVEDEIKSKKQFERNYVPMDFTIKEIRDAIPAHLFIRDTTKSILHVVKDLVTIAIVFYCATFIETLPSLALRVPAWITYWIIQGTVMVGPWILAHECGHGAFSNPRWFNSIIGWVLHSALLVPYQAWAMSHSKHHKGTGSMTKDVVFIPATRSYKGLPALEKPAVEEEVSEQEHHHHEESIFAETPIYTLGALLFVLTFGWPLYLIVNFSGHEAPHWVNHFQTVAPLYEPHQRKNIFYSNCGIVAMGSILTYLSMVFSPLTVFMYYGIPYLGVNAWIVCITYLQHTDPKVPHFRDNEWNFQRGAACTIDRSFGTIVNHLHHHIGDSHQCHHMFSQMPFYNAVEATKYLKAKLGKYYIFDDTPIAKALYRNWRECKFVEDEGDVVFYKH

SEQ ID NO: 182 - protein, 403 aa, Artificial sequence
  Delta-15 Desaturase
MAPPHVVDEQVRRRIVVEDEIKSKKQFERNYVPMDFTIKEIRDAIPAHLFIRDTTKSILHVVKDLVTIAIVFYCATFIETLPSLALRVPAWITYWIIQGTVMVGPWILAHECGHGAFSEYTSINTIIGWVLHSALLVPYQAWAMSHSKHHKSTGSMTKDVVFIPATRSYKGLPALEKPAVEEEVSEQEHHHHEESIFAETPIYTLGALLFVLTFGWPLYLIVNFSGHEAPHWVNHFQTVAPLYEPHQRKNIFYSNCGIVAMGSILTYLSMVFSPLTVFMYYGIPYLGVNAWIVCITYLQHTDPKVPHFRDNEWNFQRGAACTIDRSFGTIVNHLHHHIGDSHQCHHMFSQMPFYNAVEATKYLKAKLGKYYIFDDTPIAKALYRNWRECKFVEDEGDVVFYKH

SEQ ID NO: 183 - protein, 403 aa, Artificial sequence
  Delta-15 Desaturase
MAPPHVVDEQVRRRIVVEDEIKSKKQFERNYVPMDFTIKEIRDAIPAHLFIRDTTKSILHVVKDLVTIAIVFYCATFIETLPSLALRVPAWITYWIIQGTVMVGPWILAHECGHGAFSNSKWFNNIIGWVLHSALLVPYQAWAMSHSKHHKGTGSMTKDFVFIPATRSYKGLPALEKPAVEEEVSEQEHHHHEESIFAETPIYTLGALLFVLTFGWPLYLIVNFSGHEAPHWVNHFQTVAPLYEPHQRKNIFYSNCGIVAMGSILTYLSMVFSPLTVFMYYGIPYLGVNAWIVCITYLQHTDPKVPHFRDNEWNFQRGAACTIDRSFGTIVNHLHHHIGDSHQCHHMFSQMPFYNAVEATKYLKAKLGKYYIFDDTPIAKALYRNWRECKFVEDEGDVVFYKH

SEQ ID NO: 184 - protein, 403 aa, Artificial sequence
  Delta-15 Desaturase
MAPPHVVDEQVRRRIVVEDEIKSKKQFERNYVPMDFTIKEIRDAIPAHLFIRDTTKSILHVVKDLVTIAIVFYCATFIETLPSLALRVPAWITYWIIQGTVMVGPWILAHECGHGAFSNSTTFNNIFGWVLHSALLVPYQAWAMSHSKHHKVTGSMTKDVVFIPATRSYKGLPALEKPAVEEEVSEQEHHHHEESIFAETPIYTLGALLFVLTFGWPLYLIVNFSGHEAPHWVNHFQTVAPLYEPHQRKNIFYSNCGIVAMGSILTYLSMVFSPLTVFMYYGIPYLGVNAWIVCITYLQHTDPKVPHFRDNEWNFQRGAACTIDRSFGTIVNHLHHHIGDSHQCHHMFSQMPFYNAVEATKYLKAKLGKYYIFDDTPIAKALYRNWRECKFVEDEGDVVFYKH

SEQ ID NO: 185 - protein, 403 aa, Artificial sequence
  Delta-15 Desaturase
MAPPHVVDEQVRRRIVVEDEIKSKKQFERNYVPMDFTIKEIRDAIPAHLFIRDTTKSILHVVKDLVTIAIVFYCATFIETLPSLALRVPAWITYWIIQGTVMVGPWILAHECGHGAFSESKWFNNIFGWVLHSALLVPYQAWAMSHSKHHKGTGSMTKDVVFIPATRSYKGLPALEKPAVEEEVSEQEHHHHEESIFAETPIYTLGALLFVLTFGWPLYLIVNFSGHEAPHWVNHFQTVAPLYEPHQRKNIFYSNCGIVAMGSILTYLSMVFSPLTVFMYYGIPYLGVNAWIVCITYLQHTDPKVPHFRDNEWNFQRGAACTIDRSFGTIVNHLHHHIGDSHQCHHMFSQMPFYNAVEATKYLKAKLGKYYIFDDTPIAKALYRNWRECKFVEDEGDVVFYKH

SEQ ID NO: 186 - protein, 403 aa, Artificial sequence
  Delta-15 Desaturase
MAPPHVVDEQVRRRIVVEDEIKSKKQFERNYVPMDFTIKEIRDAIPAHLFIRDTTKSILHVVKDLVTIAIVFYCATFIETLPSLALRVPAWITYWIIQGTVMVGPWILAHECGHGAFSDYKRINTIMGWVLHSALLVPYQAWAMSHSKHHKDTGSMTKDVVFIPATRSYKGLPALEKPAVEEEVSEQEHHHHEESIFAETPIYTLGALLFVLTFGWPLYLIVNFSGHEAPHWVNHFQTVAPLYEPHQRKNIFYSNCGIVAMGSILTYLSMVFSPLTVFMYYGIPYLGVNAWIVCITYLQHTDPKVPHFRDNEWNFQRGAACTIDRSFGTIVNHLHHHIGDSHQCHHMFSQMPFYNAVEATKYLKAKLGKYYIFDDTPIAKALYRNWRECKFVEDEGDVVFYKH

SEQ ID NO: 187 - protein, 403 aa, Artificial sequence
  Delta-15 Desaturase
MAPPHVVDEQVRRRIVVEDEIKSKKQFERNYVPMDFTIKEIRDAIPAHLFIRDTTKSILHVVKDLVTIAIVFYCATFIETLPSLALRVPAWITYWIIQGTVMVGPWILAHECGHGAFSKHKRFNSIFGWVLHSALLVPYQAWAMSHSKHHKGTGSMTKDVVFIPATRSYKGLPALEKPAVEEEVSEQEHHHHEESIFAETPIYTLGALLFVLTFGWPLYLIVNFSGHEAPHWVNHFQTVAPLYEPHQRKNIFYSNCGIVAMGSILTYLSMVFSPLTVFMYYGIPYLGVNAWIVCITYLQHTDPKVPHFRDNEWNFQRGAACTIDRSFGTIVNHLHHHIGDSHQCHHMFSQMPFYNAVEATKYLKAKLGKYYIFDDTPIAKALYRNWRECKFVEDEGDVVFYKH

SEQ ID NO: 188 - protein, 403 aa, Artificial sequence
  Delta-15 Desaturase
MAPPHVVDEQVRRRIVVEDEIKSKKQFERNYVPMDFTIKEIRDAIPAHLFIRDTTKSILHVVKDLVTIAIVFYCATFIETLPSLALRVPAWITYWIIQGTVMVGPWILAHECGHGAFSKYKSINTIIGWVLHSALLVPYQAWAMSHSKHHKGTGDMAKDFVFIPATRSYKGLPALEKPAVEEEVSEQEHHHHEESIFAETPIYTLGALLFVLTFGWPLYLIVNFSGHEAPHWVNHFQTVAPLYEPHQRKNIFYSNCGIVAMGSILTYLSMVFSPLTVFMYYGIPYLGVNAWIVCITYLQHTDPKVPHFRDNEWNFQRGAACTIDRSFGTIVNHLHHHIGDSHQCHHMFSQMPFYNAVEATKYLKAKLGKYYIFDDTPIAKALYRNWRECKFVEDEGDVVFYKH

SEQ ID NO: 189 - protein, 403 aa, Artificial sequence
  Delta-15 Desaturase
MAPPHVVDEQVRRRIVVEDEIKSKKQFERNYVPMDFTIKEIRDAIPAHLFIRDTTKSILHVVKDLVTIAIVFYCATFIETLPSLALRVPAWITYWIIQGTVMVGPWILAHECGHGAFSQPKWFNTILGWVLHSALLVPYQAWAMSHSKHHKGTGSMTKDVVFIPATRSYKGLPALEKPAVEEEVSEQEHHHHEESIFAETPIYTLGALLFVLTFGWPLYLIVNFSGHEAPHWVNHFQTVAPLYEPHQRKNIFYSNCGIVAMGSILTYLSMVFSPLTVFMYYGIPYLGVNAWIVCITYLQHTDPKVPHFRDNEWNFQRGAACTIDRSFGTIVNHLHHHIGDSHQCHHMFSQMPFYNAVEATKYLKAKLGKYYIFDDTPIAKALYRNWRECKFVEDEGDVVFYKH

SEQ ID NO: 190 - protein, 403 aa, Artificial sequence
  Delta-15 Desaturase
MAPPHVVDEQVRRRIVVEDEIKSKKQFERNYVPMDFTIKEIRDAIPAHLFIRDTTKSILHVVKDLVTIAIVFYCATFIETLPSLALRVPAWITYWIIQGTVMVGPWILAHECGHGAFSNHTRFNSIIGWVLHSALLVPYQAWAMSHSKHHKFTGDMAKDVVFIPATRSYKGLPALEKPAVEEEVSEQEHHHHEESIFAETPIYTLGALLFVLTFGWPLYLIVNFSGHEAPHWVNHFQTVAPLYEPHQRKNIFYSNCGIVAMGSILTYLSMVFSPLTVFMYYGIPYLGVNAWIVCITYLQHTDPKVPHFRDNEWNFQRGAACTIDRSFGTIVNHLHHHIGDSHQCHHMFSQMPFYNAVEATKYLKAKLGKYYIFDDTPIAKALYRNWRECKFVEDEGDVVFYKH

SEQ ID NO: 191 - protein, 403 aa, Artificial sequence
  Delta-15 Desaturase
MAPPHVVDEQVRRRIVVEDEIKSKKQFERNYVPMDFTIKEIRDAIPAHLFIRDTTKSILHVVKDLVTIAIVFYCATFIETLPSLALRVPAWITYWIIQGTVMVGPWILAHECGHGAFSDYRWFNSIIGWVLHSALLVPYQAWAMSHSKHHKGTGHMEKDLVFIPATRSYKGLPALEKPAVEEEVSEQEHHHHEESIFAETPIYTLGALLFVLTFGWPLYLIVNFSGHEAPHWVNHFQTVAPLYEPHQRKNIFYSNCGIVAMGSILTYLSMVFSPLTVFMYYGIPYLGVNAWIVCITYLQHTDPKVPHFRDNEWNFQRGAACTIDRSFGTIVNHLHHHIGDSHQCHHMFSQMPFYNAVEATKYLKAKLGKYYIFDDTPIAKALYRNWRECKFVEDEGDVVFYKH

SEQ ID NO: 192 - protein, 403 aa, Artificial sequence
  Delta-15 Desaturase
MAPPHVVDEQVRRRIVVEDEIKSKKQFERNYVPMDFTIKEIRDAIPAHLFIRDTTKSILHVVKDLVTIAIVFYCATFIETLPSLALRVPAWITYWIIQGTVMVGPWILAHECGHGAFSQYKTFNNILGWVLHSALLVPYQAWAMSHSKHHKGTGAMTKDLVFIPATRSYKGLPALEKPAVEEEVSEQEHHHHEESIFAETPIYTLGALLFVLTFGWPLYLIVNFSGHEAPHWVNHFQTVAPLYEPHQRKNIFYSNCGIVAMGSILTYLSMVFSPLTVFMYYGIPYLGVNAWIVCITYLQHTDPKVPHFRDNEWNFQRGAACTIDRSFGTIVNHLHHHIGDSHQCHHMFSQMPFYNAVEATKYLKAKLGKYYIFDDTPIAKALYRNWRECKFVEDEGDVVFYKH

SEQ ID NO: 193 - protein, 403 aa, Artificial sequence
  Delta-15 Desaturase
MAPPHVVDEQVRRRIVVEDEIKSKKQFERNYVPMDFTIKEIRDAIPAHLFIRDTTKSILHVVKDLVTIAIVFYCATFIETLPSLALRVPAWITYWIIQGTVMVGPWILAHECGHGAFSNYKSINSILGWVLHSALLVPYQAWAMSHSKHHKSTGSMTKDLVFIPATRSYKGLPALEKPAVEEEVSEQEHHHHEESIFAETPIYTLGALLFVLTFGWPLYLIVNFSGHEAPHWVNHFQTVAPLYEPHQRKNIFYSNCGIVAMGSILTYLSMVFSPLTVFMYYGIPYLGVNAWIVCITYLQHTDPKVPHFRDNEWNFQRGAACTIDRSFGTIVNHLHHHIGDSHQCHHMFSQMPFYNAVEATKYLKAKLGKYYIFDDTPIAKALYRNWRECKFVEDEGDVVFYKH

SEQ ID NO: 194 - protein, 403 aa, Artificial sequence
  Delta-15 Desaturase
MAPPHVVDEQVRRRIVVEDEIKSKKQFERNYVPMDFTIKEIRDAIPAHLFIRDTTKSILHVVKDLVTIAIVFYCATFIETLPSLALRVPAWITYWIIQGTVMVGPWILAHECGHGAFSNPTWINYIFGWVLHSALLVPYQAWAMSHSKHHKCTGNMAKDIVFIPATRSYKGLPALEKPAVEEEVSEQEHHHHEESIFAETPIYTLGALLFVLTFGWPLYLIVNFSGHEAPHWVNHFQTVAPLYEPHQRKNIFYSNCGIVAMGSILTYLSMVFSPLTVFMYYGIPYLGVNAWIVCITYLQHTDPKVPHFRDNEWNFQRGAACTIDRSFGTIVNHLHHHIGDSHQCHHMFSQMPFYNAVEATKYLKAKLGKYYIFDDTPIAKALYRNWRECKFVEDEGDVVFYKH

SEQ ID NO: 195 - protein, 403 aa, Artificial sequence
  Delta-15 Desaturase
MAPPHVVDEQVRRRIVVEDEIKSKKQFERNYVPMDFTIKEIRDAIPAHLFIRDTTKSILHVVKDLVTIAIVFYCATFIETLPSLALRVPAWITYWIIQGTVMVGPWILAHECGHGAFSHPKRFNSIFGWVLHSALLVPYQAWAMSHSKHHKGTGSMTKDVVFIPATRSYKGLPALEKPAVEEEVSEQEHHHHEESIFAETPIYTLGALLFVLTFGWPLYLIVNFSGHEAPHWVNHFQTVAPLYEPHQRKNIFYSNCGIVAMGSILTYLSMVFSPLTVFMYYGIPYLGVNAWIVCITYLQHTDPKVPHFRDNEWNFQRGAACTIDRSFGTIVNHLHHHIGDSHQCHHMFSQMPFYNAVEATKYLKAKLGKYYIFDDTPIAKALYRNWRECKFVEDEGDVVFYKH

SEQ ID NO: 196 - protein, 403 aa, Artificial sequence
  Delta-15 Desaturase
MAPPHVVDEQVRRRIVVEDEIKSKKQFERNYVPMDFTIKEIRDAIPAHLFIRDTTKSILHVVKDLVTIAIVFYCATFIETLPSLALRVPAWITYWIIQGTVMVGPWILAHECGHGAFSDSRSFNNIFGWVLHSALLVPYQAWAMSHSKHHKDTGHMTKDVVFIPATRSYKGLPALEKPAVEEEVSEQEHHHHEESIFAETPIYTLGALLFVLTFGWPLYLIVNFSGHEAPHWVNHFQTVAPLYEPHQRKNIFYSNCGIVAMGSILTYLSMVFSPLTVFMYYGIPYLGVNAWIVCITYLQHTDPKVPHFRDNEWNFQRGAACTIDRSFGTIVNHLHHHIGDSHQCHHMFSQMPFYNAVEATKYLKAKLGKYYIFDDTPIAKALYRNWRECKFVEDEGDVVFYKH

SEQ ID NO: 197 - protein, 403 aa, Artificial sequence
  Delta-15 Desaturase
MAPPHVVDEQVRRRIVVEDEIKSKKQFERNYVPMDFTIKEIRDAIPAHLFIRDTTKSILHVVKDLVTIAIVFYCATFIETLPSLALRVPAWITYWIIQGTVMVGPWILAHECGHGAFSDYTWFKSIFGWVLHSALLVPYQAWAMSHSKHHKGTGSMTKDVVFIPATRSYKGLPALEKPAVEEEVSEQEHHHHEESIFAETPIYTLGALLFVLTFGWPLYLIVNFSGHEAPHWVNHFQTVAPLYEPHQRKNIFYSNCGIVAMGSILTYLSMVFSPLTVFMYYGIPYLGVNAWIVCITYLQHTDPKVPHFRDNEWNFQRGAACTIDRSFGTIVNHLHHHIGDSHQCHHMFSQMPFYNAVEATKYLKAKLGKYYIFDDTPIAKALYRNWRECKFVEDEGDVVFYKH

SEQ ID NO: 198 - protein, 403 aa, Artificial sequence
  Delta-15 Desaturase
MAPPHVVDEQVRRRIVVEDEIKSKKQFERNYVPMDFTIKEIRDAIPAHLFIRDTTKSILHVVKDLVTIAIVFYCATFIETLPSLALRVPAWITYWIIQGTVMVGPWILAHECGHGAFSDPTSFNSIMGWVLHSALLVPYQAWAMSHSKHHKGTGSMTKDVVFIPATRSYKGLPALEKPAVEEEVSEQEHHHHEESIFAETPIYTLGALLFVLTFGWPLYLIVNFSGHEAPHWVNHFQTVAPLYEPHQRKNIFYSNCGIVAMGSILTYLSMVFSPLTVFMYYGIPYLGVNAWIVCITYLQHTDPKVPHFRDNEWNFQRGAACTIDRSFGTIVNHLHHHIGDSHQCHHMFSQMPFYNAVEATKYLKAKLGKYYIFDDTPIAKALYRNWRECKFVEDEGDVVFYKH

SEQ ID NO: 199 - protein, 403 aa, Artificial sequence
  Delta-15 Desaturase
MAPPHVVDEQVRRRIVVEDEIKSKKQFERNYVPMDFTIKEIRDAIPAHLFIRDTTKSILHVVKDLVTIAIVFYCATFIETLPSLALRVPAWITYWIIQGTVMVGPWILAHECGHGAFSQHKWFNTIFGWVLHSALLVPYQAWAMSHSKHHKGTGSMTKDVVFIPATRSYKGLPALEKPAVEEEVSEQEHHHHEESIFAETPIYTLGALLFVLTFGWPLYLIVNFSGHEAPHWVNHFQTVAPLYEPHQRKNIFYSNCGIVAMGSILTYLSMVFSPLTVFMYYGIPYLGVNAWIVCITYLQHTDPKVPHFRDNEWNFQRGAACTIDRSFGTIVNHLHHHIGDSHQCHHMFSQMPFYNAVEATKYLKAKLGKYYIFDDTPIAKALYRNWRECKFVEDEGDVVFYKH

SEQ ID NO: 200 - protein, 403 aa, Artificial sequence
  Delta-15 Desaturase
MAPPHVVDEQVRRRIVVEDEIKSKKQFERNYVPMDFTIKEIRDAIPAHLFIRDTTKSILHVVKDLVTIAIVFYCATFIETLPSLALRVPAWITYWIIQGTVMVGPWILAHECGHGAFSNPKRINSIFGWVLHSALLVPYQAWAMSHSKHHKGTGSMTKDVVFIPATRSYKGLPALEKPAVEEEVSEQEHHHHEESIFAETPIYTLGALLFVLTFGWPLYLIVNFSGHEAPHWVNHFQTVAPLYEPHQRKNIFYSNCGIVAMGSILTYLSMVFSPLTVFMYYGIPYLGVNAWIVCITYLQHTDPKVPHFRDNEWNFQRGAACTIDRSFGTIVNHLHHHIGDSHQCHHMFSQMPFYNAVEATKYLKAKLGKYYIFDDTPIAKALYRNWRECKFVEDEGDVVFYKH

SEQ ID NO: 201 - protein, 403 aa, Artificial sequence
  Delta-15 Desaturase
MAPPHVVDEQVRRRIVVEDEIKSKKQFERNYVPMDFTIKEIRDAIPAHLFIRDTTKSILHVVKDLVTIAIVFYCATFIETLPSLALRVPAWITYWIIQGTVMVGPWILAHECGHGAFSKHKRINSILGWVLHSALLVPYQAWAMSHSKHHKSTGNMAKDMVFIPATRSYKGLPALEKPAVEEEVSEQEHHHHEESIFAETPIYTLGALLFVLTFGWPLYLIVNFSGHEAPHWVNHFQTVAPLYEPHQRKNIFYSNCGIVAMGSILTYLSMVFSPLTVFMYYGIPYLGVNAWIVCITYLQHTDPKVPHFRDNEWNFQRGAACTIDRSFGTIVNHLHHHIGDSHQCHHMFSQMPFYNAVEATKYLKAKLGKYYIFDDTPIAKALYRNWRECKFVEDEGDVVFYKH

SEQ ID NO: 202 - protein, 403 aa, Artificial sequence
  Delta-15 Desaturase
MAPPHVVDEQVRRRIVVEDEIKSKKQFERNYVPMDFTIKEIRDAIPAHLFIRDTTKSILHVVKDLVTIAIVFYCATFIETLPSLALRVPAWITYWIIQGTVMVGPWILAHECGHGAFSKYKRFNSILGWVLHSALLVPYQAWAMSHSKHHKSTGHMAKDFVFIPATRSYKGLPALEKPAVEEEVSEQEHHHHEESIFAETPIYTLGALLFVLTFGWPLYLIVNFSGHEAPHWVNHFQTVAPLYEPHQRKNIFYSNCGIVAMGSILTYLSMVFSPLTVFMYYGIPYLGVNAWIVCITYLQHTDPKVPHFRDNEWNFQRGAACTIDRSFGTIVNHLHHHIGDSHQCHHMFSQMPFYNAVEATKYLKAKLGKYYIFDDTPIAKALYRNWRECKFVEDEGDVVFYKH

SEQ ID NO: 203 - protein, 403 aa, Artificial sequence
  Delta-15 Desaturase
MAPPHVVDEQVRRRIVVEDEIKSKKQFERNYVPMDFTIKEIRDAIPAHLFIRDTTKSILHVVKDLVTIAIVFYCATFIETLPSLALRVPAWITYWIIQGTVMVGPWILAHECGHGAFSEHRTINNIIGWVLHSALLVPYQAWAMSHSKHHKGTGSMTKDVVFIPATRSYKGLPALEKPAVEEEVSEQEHHHHEESIFAETPIYTLGALLFVLTFGWPLYLIVNFSGHEAPHWVNHFQTVAPLYEPHQRKNIFYSNCGIVAMGSILTYLSMVFSPLTVFMYYGIPYLGVNAWIVCITYLQHTDPKVPHFRDNEWNFQRGAACTIDRSFGTIVNHLHHHIGDSHQCHHMFSQMPFYNAVEATKYLKAKLGKYYIFDDTPIAKALYRNWRECKFVEDEGDVVFYKH

SEQ ID NO: 204 - protein, 403 aa, Artificial sequence
  Delta-15 Desaturase
MAPPHVVDEQVRRRIVVEDEIKSKKQFERNYVPMDFTIKEIRDAIPAHLFIRDTTKSILHVVKDLVTIAIVFYCATFIETLPSLALRVPAWITYWIIQGTVMVGPWILAHECGHGAFSKHTTINYIFGWVLHSALLVPYQAWAMSHSKHHKYTGSMTKDVVFIPATRSYKGLPALEKPAVEEEVSEQEHHHHEESIFAETPIYTLGALLFVLTFGWPLYLIVNFSGHEAPHWVNHFQTVAPLYEPHQRKNIFYSNCGIVAMGSILTYLSMVFSPLTVFMYYGIPYLGVNAWIVCITYLQHTDPKVPHFRDNEWNFQRGAACTIDRSFGTIVNHLHHHIGDSHQCHHMFSQMPFYNAVEATKYLKAKLGKYYIFDDTPIAKALYRNWRECKFVEDEGDVVFYKH

SEQ ID NO: 205 - protein, 403 aa, Artificial sequence
  Delta-15 Desaturase
MAPPHVVDEQVRRRIVVEDEIKSKKQFERNYVPMDFTIKEIRDAIPAHLFIRDTTKSILHVVKDLVTIAIVFYCATFIETLPSLALRVPAWITYWIIQGTVMVGPWILAHECGHGAFSKPKRINSIFGWVLHSALLVPYQAWAMSHSKHHKGTGSMTKDVVFIPATRSYKGLPALEKPAVEEEVSEQEHHHHEESIFAETPIYTLGALLFVLTFGWPLYLIVNFSGHEAPHWVNHFQTVAPLYEPHQRKNIFYSNCGIVAMGSILTYLSMVFSPLTVFMYYGIPYLGVNAWIVCITYLQHTDPKVPHFRDNEWNFQRGAACTIDRSFGTIVNHLHHHIGDSHQCHHMFSQMPFYNAVEATKYLKAKLGKYYIFDDTPIAKALYRNWRECKFVEDEGDVVFYKH

SEQ ID NO: 206 - protein, 403 aa, Artificial sequence
  Delta-15 Desaturase
MAPPHVVDEQVRRRIVVEDEIKSKKQFERNYVPMDFTIKEIRDAIPAHLFIRDTTKSILHVVKDLVTIAIVFYCATFIETLPSLALRVPAWITYWIIQGTVMVGPWILAHECGHGAFSEYKRINNIFGWVLHSALLVPYQAWAMSHSKHHKYTGHMTKDIVFIPATRSYKGLPALEKPAVEEEVSEQEHHHHEESIFAETPIYTLGALLFVLTFGWPLYLIVNFSGHEAPHWVNHFQTVAPLYEPHQRKNIFYSNCGIVAMGSILTYLSMVFSPLTVFMYYGIPYLGVNAWIVCITYLQHTDPKVPHFRDNEWNFQRGAACTIDRSFGTIVNHLHHHIGDSHQCHHMFSQMPFYNAVEATKYLKAKLGKYYIFDDTPIAKALYRNWRECKFVEDEGDVVFYKH

SEQ ID NO: 207 - protein, 403 aa, Artificial sequence
  Delta-15 Desaturase
MAPPHVVDEQVRRRIVVEDEIKSKKQFERNYVPMDFTIKEIRDAIPAHLFIRDTTKSILHVVKDLVTIAIVFYCATFIETLPSLALRVPAWITYWIIQGTVMVGPWILAHECGHGAFSKYRSFNSIMGWVLHSALLVPYQAWAMSHSKHHKCTGDMKKDLVFIPATRSYKGLPALEKPAVEEEVSEQEHHHHEESIFAETPIYTLGALLFVLTFGWPLYLIVNFSGHEAPHWVNHFQTVAPLYEPHQRKNIFYSNCGIVAMGSILTYLSMVFSPLTVFMYYGIPYLGVNAWIVCITYLQHTDPKVPHFRDNEWNFQRGAACTIDRSFGTIVNHLHHHIGDSHQCHHMFSQMPFYNAVEATKYLKAKLGKYYIFDDTPIAKALYRNWRECKFVEDEGDVVFYKH

SEQ ID NO: 208 - protein, 403 aa, Artificial sequence
  Delta-15 Desaturase
MAPPHVVDEQVRRRIVVEDEIKSKKQFERNYVPMDFTIKEIRDAIPAHLFIRDTTKSILHVVKDLVTIAIVFYCATFIETLPSLALRVPAWITYWIIQGTVMVGPWILAHECGHGAFSKPKSFNYIFGWVLHSALLVPYQAWAMSHSKHHKGTGSMTKDVVFIPATRSYKGLPALEKPAVEEEVSEQEHHHHEESIFAETPIYTLGALLFVLTFGWPLYLIVNFSGHEAPHWVNHFQTVAPLYEPHQRKNIFYSNCGIVAMGSILTYLSMVFSPLTVFMYYGIPYLGVNAWIVCITYLQHTDPKVPHFRDNEWNFQRGAACTIDRSFGTIVNHLHHHIGDSHQCHHMFSQMPFYNAVEATKYLKAKLGKYYIFDDTPIAKALYRNWRECKFVEDEGDVVFYKH

SEQ ID NO: 209 - protein, 403 aa, Artificial sequence
  Delta-15 Desaturase
MAPPHVVDEQVRRRIVVEDEIKSKKQFERNYVPMDFTIKEIRDAIPAHLFIRDTTKSILHVVKDLVTIAIVFYCATFIETLPSLALRVPAWITYWIIQGTVMVGPWILAHECGHGAFSKPRAFNSIMGWVLHSALLVPYQAWAMSHSKHHKGTGSMTKDVVFIPATRSYKGLPALEKPAVEEEVSEQEHHHHEESIFAETPIYTLGALLFVLTFGWPLYLIVNFSGHEAPHWVNHFQTVAPLYEPHQRKNIFYSNCGIVAMGSILTYLSMVFSPLTVFMYYGIPYLGVNAWIVCITYLQHTDPKVPHFRDNEWNFQRGAACTIDRSFGTIVNHLHHHIGDSHQCHHMFSQMPFYNAVEATKYLKAKLGKYYIFDDTPIAKALYRNWRECKFVEDEGDVVFYKH

SEQ ID NO: 210 - protein, 403 aa, Artificial sequence
  Delta-15 Desaturase
MAPPHVVDEQVRRRIVVEDEIKSKKQFERNYVPMDFTIKEIRDAIPAHLFIRDTTKSILHVVKDLVTIAIVFYCATFIETLPSLALRVPAWITYWIIQGTVMVGPWILAHECGHGAFSKPTRFNYIFGWVLHSALLVPYQAWAMSHSKHHKGTGSMTKDVVFIPATRSYKGLPALEKPAVEEEVSEQEHHHHEESIFAETPIYTLGALLFVLTFGWPLYLIVNFSGHEAPHWVNHFQTVAPLYEPHQRKNIFYSNCGIVAMGSILTYLSMVFSPLTVFMYYGIPYLGVNAWIVCITYLQHTDPKVPHFRDNEWNFQRGAACTIDRSFGTIVNHLHHHIGDSHQCHHMFSQMPFYNAVEATKYLKAKLGKYYIFDDTPIAKALYRNWRECKFVEDEGDVVFYKH

SEQ ID NO: 211 - protein, 403 aa, Artificial sequence
  Delta-15 Desaturase
MAPPHVVDEQVRRRIVVEDEIKSKKQFERNYVPMDFTIKEIRDAIPAHLFIRDTTKSILHVVKDLVTIAIVFYCATFIETLPSLALRVPAWITYWIIQGTVMVGPWILAHECGHGAFSKPTWFNTIMGWVLHSALLVPYQAWAMSHSKHHKGTGSMTKDVVFIPATRSYKGLPALEKPAVEEEVSEQEHHHHEESIFAETPIYTLGALLFVLTFGWPLYLIVNFSGHEAPHWVNHFQTVAPLYEPHQRKNIFYSNCGIVAMGSILTYLSMVFSPLTVFMYYGIPYLGVNAWIVCITYLQHTDPKVPHFRDNEWNFQRGAACTIDRSFGTIVNHLHHHIGDSHQCHHMFSQMPFYNAVEATKYLKAKLGKYYIFDDTPIAKALYRNWRECKFVEDEGDVVFYKH

SEQ ID NO: 212 - protein, 403 aa, Artificial sequence
  Delta-15 Desaturase
MAPPHVVDEQVRRRIVVEDEIKSKKQFERNYVPMDFTIKEIRDAIPAHLFIRDTTKSILHVVKDLVTIAIVFYCATFIETLPSLALRVPAWITYWIIQGTVMVGPWILAHECGHGAFSNHKRINNIIGWVLHSALLVPYQAWAMSHSKHHKGTGSMTKDVVFIPATRSYKGLPALEKPAVEEEVSEQEHHHHEESIFAETPIYTLGALLFVLTFGWPLYLIVNFSGHEAPHWVNHFQTVAPLYEPHQRKNIFYSNCGIVAMGSILTYLSMVFSPLTVFMYYGIPYLGVNAWIVCITYLQHTDPKVPHFRDNEWNFQRGAACTIDRSFGTIVNHLHHHIGDSHQCHHMFSQMPFYNAVEATKYLKAKLGKYYIFDDTPIAKALYRNWRECKFVEDEGDVVFYKH

SEQ ID NO: 213 - protein, 403 aa, Artificial sequence
  Delta-15 Desaturase
MAPPHVVDEQVRRRIVVEDEIKSKKQFERNYVPMDFTIKEIRDAIPAHLFIRDTTKSILHVVKDLVTIAIVFYCATFIETLPSLALRVPAWITYWIIQGTVMVGPWILAHECGHGAFSKYKWFNYIMGWVLHSALLVPYQAWAMSHSKHHKATGHMSKDLVFIPATRSYKGLPALEKPAVEEEVSEQEHHHHEESIFAETPIYTLGALLFVLTFGWPLYLIVNFSGHEAPHWVNHFQTVAPLYEPHQRKNIFYSNCGIVAMGSILTYLSMVFSPLTVFMYYGIPYLGVNAWIVCITYLQHTDPKVPHFRDNEWNFQRGAACTIDRSFGTIVNHLHHHIGDSHQCHHMFSQMPFYNAVEATKYLKAKLGKYYIFDDTPIAKALYRNWRECKFVEDEGDVVFYKH

SEQ ID NO: 214 - protein, 403 aa, Artificial sequence
  Delta-15 Desaturase
MAPPHVVDEQVRRRIVVEDEIKSKKQFERNYVPMDFTIKEIRDAIPAHLFIRDTTKSILHVVKDLVTIAIVFYCATFIETLPSLALRVPAWITYWIIQGTVMVGPWILAHECGHGAFSEYTWFNSILGWVLHSALLVPYQAWAMSHSKHHKYTGHMSKDLVFIPATRSYKGLPALEKPAVEEEVSEQEHHHHEESIFAETPIYTLGALLFVLTFGWPLYLIVNFSGHEAPHWVNHFQTVAPLYEPHQRKNIFYSNCGIVAMGSILTYLSMVFSPLTVFMYYGIPYLGVNAWIVCITYLQHTDPKVPHFRDNEWNFQRGAACTIDRSFGTIVNHLHHHIGDSHQCHHMFSQMPFYNAVEATKYLKAKLGKYYIFDDTPIAKALYRNWRECKFVEDEGDVVFYKH

SEQ ID NO: 215 - protein, 403 aa, Artificial sequence
  Delta-15 Desaturase
MAPPHVVDEQVRRRIVVEDEIKSKKQFERNYVPMDFTIKEIRDAIPAHLFIRDTTKSILHVVKDLVTIAIVFYCATFIETLPSLALRVPAWITYWIIQGTVMVGPWILAHECGHGAFSKSKRINTILGWVLHSALLVPYQAWAMSHSKHHKYTGRMSKDVVFIPATRSYKGLPALEKPAVEEEVSEQEHHHHEESIFAETPIYTLGALLFVLTFGWPLYLIVNFSGHEAPHWVNHFQTVAPLYEPHQRKNIFYSNCGIVAMGSILTYLSMVFSPLTVFMYYGIPYLGVNAWIVCITYLQHTDPKVPHFRDNEWNFQRGAACTIDRSFGTIVNHLHHHIGDSHQCHHMFSQMPFYNAVEATKYLKAKLGKYYIFDDTPIAKALYRNWRECKFVEDEGDVVFYKH

SEQ ID NO: 216 - protein, 403 aa, Artificial sequence
  Delta-15 Desaturase
MAPPHVVDEQVRRRIVVEDEIKSKKQFERNYVPMDFTIKEIRDAIPAHLFIRDTTKSILHVVKDLVTIAIVFYCATFIETLPSLALRVPAWITYWIIQGTVMVGPWILAHECGHGAFSESRRINNIFGWVLHSALLVPYQAWAMSHSKHHKGTGSMTKDVVFIPATRSYKGLPALEKPAVEEEVSEQEHHHHEESIFAETPIYTLGALLFVLTFGWPLYLIVNFSGHEAPHWVNHFQTVAPLYEPHQRKNIFYSNCGIVAMGSILTYLSMVFSPLTVFMYYGIPYLGVNAWIVCITYLQHTDPKVPHFRDNEWNFQRGAACTIDRSFGTIVNHLHHHIGDSHQCHHMFSQMPFYNAVEATKYLKAKLGKYYIFDDTPIAKALYRNWRECKFVEDEGDVVFYKH

SEQ ID NO: 217 - protein, 403 aa, Artificial sequence
  Delta-15 Desaturase
MAPPHVVDEQVRRRIVVEDEIKSKKQFERNYVPMDFTIKEIRDAIPAHLFIRDTTKSILHVVKDLVTIAIVFYCATFIETLPSLALRVPAWITYWIIQGTVMVGPWILAHECGHGAFSEPKTINTIFGWVLHSALLVPYQAWAMSHSKHHKFTGNMKKDVVFIPATRSYKGLPALEKPAVEEEVSEQEHHHHEESIFAETPIYTLGALLFVLTFGWPLYLIVNFSGHEAPHWVNHFQTVAPLYEPHQRKNIFYSNCGIVAMGSILTYLSMVFSPLTVFMYYGIPYLGVNAWIVCITYLQHTDPKVPHFRDNEWNFQRGAACTIDRSFGTIVNHLHHHIGDSHQCHHMFSQMPFYNAVEATKYLKAKLGKYYIFDDTPIAKALYRNWRECKFVEDEGDVVFYKH

SEQ ID NO: 218 - protein, 403 aa, Artificial sequence
  Delta-15 Desaturase
MAPPHVVDEQVRRRIVVEDEIKSKKQFERNYVPMDFTIKEIRDAIPAHLFIRDTTKSILHVVKDLVTIAIVFYCATFIETLPSLALRVPAWITYWIIQGTVMVGPWILAHECGHGAFSQPRTFNTIFGWVLHSALLVPYQAWAMSHSKHHKGTGSMTKDVVFIPATRSYKGLPALEKPAVEEEVSEQEHHHHEESIFAETPIYTLGALLFVLTFGWPLYLIVNFSGHEAPHWVNHFQTVAPLYEPHQRKNIFYSNCGIVAMGSILTYLSMVFSPLTVFMYYGIPYLGVNAWIVCITYLQHTDPKVPHFRDNEWNFQRGAACTIDRSFGTIVNHLHHHIGDSHQCHHMFSQMPFYNAVEATKYLKAKLGKYYIFDDTPIAKALYRNWRECKFVEDEGDVVFYKH

SEQ ID NO: 219 - protein, 403 aa, Artificial sequence
  Delta-15 Desaturase
MAPPHVVDEQVRRRIVVEDEIKSKKQFERNYVPMDFTIKEIRDAIPAHLFIRDTTKSILHVVKDLVTIAIVFYCATFIETLPSLALRVPAWITYWIIQGTVMVGPWILAHECGHGAFSQSRSFNTIFGWVLHSALLVPYQAWAMSHSKHHKGTGSMTKDVVFIPATRSYKGLPALEKPAVEEEVSEQEHHHHEESIFAETPIYTLGALLFVLTFGWPLYLIVNFSGHEAPHWVNHFQTVAPLYEPHQRKNIFYSNCGIVAMGSILTYLSMVFSPLTVFMYYGIPYLGVNAWIVCITYLQHTDPKVPHFRDNEWNFQRGAACTIDRSFGTIVNHLHHHIGDSHQCHHMFSQMPFYNAVEATKYLKAKLGKYYIFDDTPIAKALYRNWRECKFVEDEGDVVFYKH

SEQ ID NO: 220 - protein, 403 aa, Artificial sequence
  Delta-15 Desaturase
MAPPHVVDEQVRRRIVVEDEIKSKKQFERNYVPMDFTIKEIRDAIPAHLFIRDTTKSILHVVKDLVTIAIVFYCATFIETLPSLALRVPAWITYWIIQGTVMVGPWILAHECGHGAFSKPTRFNYIIGWVLHSALLVPYQAWAMSHSKHHKGTGSMTKDVVFIPATRSYKGLPALEKPAVEEEVSEQEHHHHEESIFAETPIYTLGALLFVLTFGWPLYLIVNFSGHEAPHWVNHFQTVAPLYEPHQRKNIFYSNCGIVAMGSILTYLSMVFSPLTVFMYYGIPYLGVNAWIVCITYLQHTDPKVPHFRDNEWNFQRGAACTIDRSFGTIVNHLHHHIGDSHQCHHMFSQMPFYNAVEATKYLKAKLGKYYIFDDTPIAKALYRNWRECKFVEDEGDVVFYKH

SEQ ID NO: 221 - protein, 403 aa, Artificial sequence
  Delta-15 Desaturase
MAPPHVVDEQVRRRIVVEDEIKSKKQFERNYVPMDFTIKEIRDAIPAHLFIRDTTKSILHVVKDLVTIAIVFYCATFIETLPSLALRVPAWITYWIIQGTVMVGPWILAHECGHGAFSHSTWFNSILGWVLHSALLVPYQAWAMSHSKHHKFTGDMTKDVVFIPATRSYKGLPALEKPAVEEEVSEQEHHHHEESIFAETPIYTLGALLFVLTFGWPLYLIVNFSGHEAPHWVNHFQTVAPLYEPHQRKNIFYSNCGIVAMGSILTYLSMVFSPLTVFMYYGIPYLGVNAWIVCITYLQHTDPKVPHFRDNEWNFQRGAACTIDRSFGTIVNHLHHHIGDSHQCHHMFSQMPFYNAVEATKYLKAKLGKYYIFDDTPIAKALYRNWRECKFVEDEGDVVFYKH

SEQ ID NO: 222 - protein, 403 aa, Artificial sequence
  Delta-15 Desaturase
MAPPHVVDEQVRRRIVVEDEIKSKKQFERNYVPMDFTIKEIRDAIPAHLFIRDTTKSILHVVKDLVTIAIVFYCATFIETLPSLALRVPAWITYWIIQGTVMVGPWILAHECGHGAFSEPKSINYIMGWVLHSALLVPYQAWAMSHSKHHKGTGSMTKDVVFIPATRSYKGLPALEKPAVEEEVSEQEHHHHEESIFAETPIYTLGALLFVLTFGWPLYLIVNFSGHEAPHWVNHFQTVAPLYEPHQRKNIFYSNCGIVAMGSILTYLSMVFSPLTVFMYYGIPYLGVNAWIVCITYLQHTDPKVPHFRDNEWNFQRGAACTIDRSFGTIVNHLHHHIGDSHQCHHMFSQMPFYNAVEATKYLKAKLGKYYIFDDTPIAKALYRNWRECKFVEDEGDVVFYKH

SEQ ID NO: 223 - protein, 403 aa, Artificial sequence
  Delta-15 Desaturase
MAPPHVVDEQVRRRIVVEDEIKSKKQFERNYVPMDFTIKEIRDAIPAHLFIRDTTKSILHVVKDLVTIAIVFYCATFIETLPSLALRVPAWITYWIIQGTVMVGPWILAHECGHGAFSKHTTFNNIFGWVLHSALLVPYQAWAMSHSKHHKGTGSMTKDVVFIPATRSYKGLPALEKPAVEEEVSEQEHHHHEESIFAETPIYTLGALLFVLTFGWPLYLIVNFSGHGAPHWVNHFQTVAPLYEPHQRKNIFYSNCGIVAMGSILTYLSMVFSPLTVFMYYGIPYLGVNAWIVCITYLQHTDPKVPHFRDNEWNFQRGAACTIDRSFGTIVNHLHHHIGDSHQCHHMFSQMPFYNAVEATKYLKAKLGKYYIFDDTPIAKALYRNWRECKFVEDEGDVVFYKH

SEQ ID NO: 224 - protein, 403 aa, Artificial sequence
  Delta-15 Desaturase
MAPPHVVDEQVRRRIVVEDEIKSKKQFERNYVPMDFTIKEIRDAIPAHLFIRDTTKSILHVVKDLVTIAIVFYCATFIETLPSLALRVPAWITYWIIQGTVMVGPWILAHECGHGAFSKYKSFNNILGWVLHSALLVPYQAWAMSHSKHHKYTGDMSKDLVFIPATRSYKGLPALEKPAVEEEVSEQEHHHHEESIFAETPIYTLGALLFVLTFGWPLYLIVNFSGHEAPHWVNHFQTVAPLYEPHQRKNIFYSNCGIVAMGSILTYLSMVFSPLTVFMYYGIPYLGVNAWIVCITYLQHTDPKVPHFRDNEWNFQRGAACTIDRSFGTIVNHLHHHIGDSHQCHHMFSQMPFYNAVEATKYLKAKLGKYYILDDTPIAKALYRNWRECKFVEDEGDVVFYKH

SEQ ID NO: 225 - protein, 403 aa, Artificial sequence
  Delta-15 Desaturase
MAPPHVVDEQVRRRIVVEDEIKSKKQFERNYVPMDFTIKEIRDAIPAHLFIRDTTKSILHVVKDLVTIAIVFYCATFIETLPSLALRVPAWITYWIIQGTVMVGPWILAHECGHGAFSKHRSFNSIIGWVLHSALLVPYQAWAMSHSKHHKVTGSMTKDVVFIPATRSYKGLPALEKPAVEEEVSEQEHHHHEESIFAETPIYTLGALLFVLTFGWPLYLIVNFSGHEAPHWVNHFQTVAPLYEPHQRKNIFYSNCGIVAMGSILTYLSMVFSPLTVFMYYGIPYLGVNAWIVCITYLQHTDPKVPHFRDNEWNFQRGAACTIDRSFGTIVNHLHHHIGDSHQCHHMFSQMPFYNAVEATKYLKAKLGKYYIFDDTPIAKALYRNWRECKFVEDEGDVVFYKH

SEQ ID NO: 226 - protein, 403 aa, Artificial sequence
  Delta-15 Desaturase
MAPPHVVDEQVRRRIVVEDEIKSKKQFERNYVPMDFTIKEIRDAIPAHLFIRDTTKSILHVVKDLVTIAIVFYCATFIETLPSLALRVPAWITYWIIQGTVMVGPWILAHECGHGAFSNPTWINYIFGWVLHSALLVPYQAWAMSHSKHHKGTGSMTKDVVFIPATRSYKGLPALEKPAVEEEVSEQEHHHHEESIFAETPIYTLGALLFVLTFGWPLYLIVNFSGHEAPHWVNHFQTVAPLYEPHQRKNIFYSNCGIVAMGSILTYLSMVFSPLTVFMYYGIPYLGVNAWIVCITYLQHTDPKVPHFRDNEWNFQRGAACTIDRSFGTIVNHLHHHIGDSHQCHHMFSQMPFYNAVEATKYLKAKLGKYYIFDDTPIAKALYRNWRECKFVEDEGDVVFYKH

SEQ ID NO: 227 - protein, 403 aa, Artificial sequence
  Delta-15 Desaturase
MAPPHVVDEQVRRRIVVEDEIKSKKQFERNYVPMDFTIKEIRDAIPAHLFIRDTTKSILHVVKDLVTIAIVFYCATFIETLPSLALRVPAWITYWIIQGTVMVGPWILAHECGHGAFSQPTWINYIMGWVLHSALLVPYQAWAMSHSKHHKGTGSMTKDVVFIPATRSYKGLPALEKPAVEEEVSEQEHHHHEESIFAETPIYTLGALLFVLTFGWPLYLIVNFSGHEAPHWVNHFQTVAPLYEPHQRKNIFYSNCGIVAMGSILTYLSMVFSPLTVFMYYGIPYLGVNAWIVCITYLQHTDPKVPHFRDNEWNFQRGAACTIDRSFGTIVNHLHHHIGDSHQCHHMFSQMPFYNAVEATKYLKAKLGKYYIFDDTPIAKALYRNWRECKFVEDEGDVVFYKH

SEQ ID NO: 228 - protein, 403 aa, Artificial sequence
  Delta-15 Desaturase
MAPPHVVDEQVRRRIVVEDEIKSKKQFERNYVPMDFTIKEIRDAIPAHLFIRDTTKSILHVVKDLVTIAIVFYCATFIETLPSLALRVPAWITYWIIQGTVMVGPWILAHECGHGAFSESKRFNYIMGWVLHSALLVPYQAWAMSHSKHHKGTGSMTKDVVFIPATRSYKGLPALEKPAVEEEVSEQEHHHHEESIFAETPIYTLGALLFVLTFGWPLYLIVNFSGHEAPHWVNHFQTVAPLYEPHQRKNIFYSNCGIVAMGSILTYLSMVFSPLTVFMYYGIPYLGVNAWIVCITYLQHTDPKVPHFRDNEWNFQRGAACTIDRSFGTIVNHLHHHIGDSHQCHHMFSQMPFYNAVEATKYLKAKLGKYYIFDDTPIAKALYRNWRECKFVEDEGDVVFYKH

SEQ ID NO: 229 - protein, 403 aa, Artificial sequence
  Delta-15 Desaturase
MAPPHVVDEQVRRRIVVEDEIKSKKQFERNYVPMDFTIKEIRDAIPAHLFIRDTTKSILHVVKDLVTIAIVFYCATFIETLPSLALRVPAWITYWIIQGTVMVGPWILAHECGHGAFSHPKTINSIMGWVLHSALLVPYQAWAMSHSKHHKGTGSMTKDVVFIPATRSYKGLPALEKPAVEEEVSEQEHHHHEESIFAETPIYTLGALLFVLTFGWPLYLIVNFSGHEAPHWVNHFQTVAPLYEPHQRKNIFYSNCGIVAMGSILTYLSMVFSPLTVFMYYGIPYLGVNAWIVCITYLQHTDPKVPHFRDNEWNFQRGAACTIDRSFGTIVNHLHHHIGDSHQCHHMFSQMPFYNAVEATKYLKAKLGKYYIFDDTPIAKALYRNWRECKFVEDEGDVVFYKH

SEQ ID NO: 230 - protein, 403 aa, Artificial sequence
  Delta-15 Desaturase
MAPPHVVDEQVRRRIVVEDEIKSKKQFERNYVPMDFTIKEIRDAIPAHLFIRDTTKSILHVVKDLVTIAIVFYCATFIETLPSLALRVPAWITYWIIQGTVMVGPWILAHECGHGAFSKPRTFNYILGWVLHSALLVPYQAWAMSHSKHHKGTGSMTKDVVFIPATRSYKGLPALEKPAVEEEVSEQEHHHHEESIFAETPIYTLGALLFVLTFGWPLYLIVNFSGHEAPHWVNHFQTVAPLYEPHQRKNIFYSNCGIVAMGSILTYLSMVFSPLTVFMYYGIPYLGVNAWIVCITYLQHTDPKVPHFRDNEWNFQRGAACTIDRSFGTIVNHLHHHIGDSHQCHHMFSQMPFYNAVEATKYLKAKLGKYYIFDDTPIAKALYRNWRECKFVEDEGDVVFYKH

SEQ ID NO: 231 - protein, 403 aa, Artificial sequence
  Delta-15 Desaturase
MAPPHVVDEQVRRRIVVEDEIKSKKQFERNYVPMDFTIKEIRDAIPAHLFIRDTTKSILHVVKDLVTIAIVFYCATFIETLPSLALRVPAWITYWIIQGTVMVGPWILAHECGHGAFSEPTTFNYIMGWVLHSALLVPYQAWAMSHSKHHKGTGSMTKDVVFIPATRSYKGLPALEKPAVEEEVSEQEHHHHEESIFAETPIYTLGALLFVLTFGWPLYLIVNFSGHEAPHWVNHFQTVAPLYEPHQRKNIFYSNCGIVAMGSILTYLSMVFSPLTVFMYYGIPYLGVNAWIVCITYLQHTDPKVPHFRDNEWNFQRGAACTIDRSFGTIVNHLHHHIGDSHQCHHMFSQMPFYNAVEATKYLKAKLGKYYIFDDTPIAKALYRNWRECKFVEDEGDVVFYKH

SEQ ID NO: 232 - protein, 403 aa, Artificial sequence
  Delta-15 Desaturase
MAPPHVVDEQVRRRIVVEDEIKSKKQFERNYVPMDFTIKEIRDAIPAHLFIRDTTKSILHVVKDLVTIAIVFYCATFIETLPSLALRVPAWITYWIIQGTVMVGPWILAHECGHGAFSQYKRFNTILGWVLHSALLVPYQAWAMSHSKHHKGTGSMTKDVVFIPATRSYKGLPALEKPAVEEEVSEQEHHHHEESIFAETPIYTLGALLFVLTFGWPLYLIVNFSGHEAPHWVNHFQTVAPLYEPHQRKNIFYSNCGIVAMGSILTYLSMVFSPLTVFMYYGIPYLGVNAWIVCITYLQHTDPKVPHFRDNEWNFQRGAACTIDRSFGTIVNHLHHHIGDSHQCHHMFSQMPFYNAVEATKYLKAKLGKYYIFDDTPIAKALYRNWRECKFVEDEGDVVFYKH

SEQ ID NO: 233 - protein, 403 aa, Artificial sequence
  Delta-15 Desaturase
MAPPHVVDEQVRRRIVVEDEIKSKKQFERNYVPMDFTIKEIRDAIPAHLFIRDTTKSILHVVKDLVTIAIVFYCATFIETLPSLALRVPAWITYWIIQGTVMVGPWILAHECGHGAFSQHRRINSIIGWVLHSALLVPYQAWAMSHSKHHKDTGSMTKDVVFIPATRSYKGLPALEKPAVEEEVSEQEHHHHEESIFAETPIYTLGALLFVLTFGWPLYLIVNFSGHEAPHWVNHFQTVAPLYEPHQRKNIFYSNCGIVAMGSILTYLSMVFSPLTVFMYYGIPYLGVNAWIVCITYLQHTDPKVPHFRDNEWNFQRGAACTIDRSFGTIVNHLHHHIGDSHQCHHMFSQMPFYNAVEATKYLKAKLGKYYIFDDTPIAKALYRNWRECKFVEDEGDVVFYKH

SEQ ID NO: 234 - protein, 403 aa, Artificial sequence
  Delta-15 Desaturase
MAPPHVVDEQVRRRIVVEDEIKSKKQFERNYVPMDFTIKEIRDAIPAHLFIRDTTKSILHVVKDLVTIAIVFYCATFIETLPSLALRVPAWITYWIIQGTVMVGPWILAHECGHGAFSHYTTFNNIMGWVLHSALLVPYQAWAMSHSKHHKDTGSMTKDVVFIPATRSYKGLPALEKPAVEEEVSEQEHHHHEESIFAETPIYTLGALLFVLTFGWPLYLIVNFSGHEAPHWVNHFQTVAPLYEPHQRKNIFYSNCGIVAMGSILTYLSMVFSPLTVFMYYGIPYLGVNAWIVCITYLQHTDPKVPHFRDNEWNFQRGAACTIDRSFGTIVNHLHHHIGDSHQCHHMFSQMPFYNAVEATKYLKAKLGKYYIFDDTPIAKALYRNWRECKFVEDEGDVVFYKH

SEQ ID NO: 235 - protein, 403 aa, Artificial sequence
  Delta-15 Desaturase
MAPPHVVDEQVRRRIVVEDEIKSKKQFERNYVPMDFTIKEIRDAIPAHLFIRDTTKSILHVVKDLVTIAIVFYCATFIETLPSLALRVPAWITYWIIQGTVMVGPWILAHECGHGAFSNHKTINYILGWVLHSALLVPYQAWAMSHSKHHKATGHMKKDLVFIPATRSYKGLPALEKPAVEEEVSEQEHHHHEESIFAETPIYTLGALLFVLTFGWPLYLIVNFSGHEAPHWVNHFQTVAPLYEPHQRKNIFYSNCGIVAMGSILTYLSMVFSPLTVFMYYGIPYLGVNAWIVCITYLQHTDPKVPHFRDNEWNFQRGAACTIDRSFGTIVNHLHHHIGDSHQCHHMFSQMPFYNAVEATKYLKAKLGKYYIFDDTPIAKALYRNWRECKFVEDEGDVVFYKH

SEQ ID NO: 236 - protein, 403 aa, Artificial sequence
  Delta-15 Desaturase
MAPPHVVDEQVRRRIVVEDEIKSKKQFERNYVPMDFTIKEIRDAIPAHLFIRDTTKSILHVVKDLVTIAIVFYCATFIETLPSLALRVPAWITYWIIQGTVMVGPWILAHECGHGAFSKHKWFNNIMGWVLHSALLVPYQAWAMSHSKHHKYTGAMSKDIVFIPATRSYKGLPALEKPAVEEEVSEQEHHHHEESIFAETPIYTLGALLFVLTFGWPLYLIVNFSGHEAPHWVNHFQTVAPLYEPHQRKNIFYSNCGIVAMGSILTYLSMVFSPLTVFMYYGIPYLGVNAWIVCITYLQHTDPKVPHFRDNEWNFQRGAACTIDRSFGTIVNHLHHHIGDSHQCHHMFSQMPFYNAVEATKYLKAKLGKYYIFDDTPIAKALYRNWRECKFVEDEGDVVFYKH

SEQ ID NO: 237 - protein, 403 aa, Artificial sequence
  Delta-15 Desaturase
MAPPHVVDEQVRRRIVVEDEIKSKKQFERNYVPMDFTIKEIRDAIPAHLFIRDTTKSILHVVKDLVTIAIVFYCATFIETLPSLALRVPAWITYWIIQGTVMVGPWILAHECGHGAFSKHTRINTIMGWVLHSALLVPYQAWAMSHSKHHKGTGTMSKDVVFIPATRSYKGLPALEKPAVEEEVSEQEHHHHEESIFAETPIYTLGALLFVLTFGWPLYLIVNFSGHEAPHWVNHFQTVAPLYEPHQRKNIFYSNCGIVAMGSILTYLSMVFSPLTVFMYYGIPYLGVNAWIVCITYLQHTDPKVPHFRDNEWNFQRGAACTIDRSFGTIVNHLHHHIGDSHQCHHMFSQMPFYNAVEATKYLKAKLGKYYIFDDTPIAKALYRNWRECKFVEDEGDVVFYKH

SEQ ID NO: 238 - protein, 403 aa, Artificial sequence
  Delta-15 Desaturase
MAPPHVVDEQVRRRIVVEDEIKSKKQFERNYVPMDFTIKEIRDAIPAHLFIRDTTKSILHVVKDLVTIAIVFYCATFIETLPSLALRVPAWITYWIIQGTVMVGPWILAHECGHGAFSEYTWFNYIFGWVLHSALLVPYQAWAMSHSKHHKGTGSMTKDVVFIPATRSYKGLPALEKPAVEEEVSEQEHHHHEESIFAETPIYTLGALLFVLTFGWPLYLIVNFSGHEAPHWVNHFQTVAPLYEPHQRKNIFYSNCGIVAMGSILTYLSMVFSPLTVFMYYGIPYLGVNAWIVCITYLQHTDPKVPHFRDNEWNFQRGAACTIDRSFGTIVNHLHHHIGDSHQCHHMFSQMPFYNAVEATKYLKAKLGKYYIFDDTPIAKALYRNWRECKFVEDEGDVVFYKH

SEQ ID NO: 239 - protein, 403 aa, Artificial sequence
  Delta-15 Desaturase
MAPPHVVDEQVRRRIVVEDEIKSKKQFERNYVPMDFTIKEIRDAIPAHLFIRDTTKSILHVVKDLVTIAIVFYCATFIETLPSLALRVPAWITYWIIQGTVMVGPWILAHECGHGAFSEYKSFNSIIGWVLHSALLVPYQAWAMSHSKHHKDTGHMEKDVVFIPATRSYKGLPALEKPAVEEEVSEQEHHHHEESIFAETPIYTLGALLFVLTFGWPLYLIVNFSGHEAPHWVNHFQTVAPLYEPHQRKNIFYSNCGIVAMGSILTYLSMVFSPLTVFMYYGIPYLGVNAWIVCITYLQHTDPKVPHFRDNEWNFQRGAACTIDRSFGTIVNHLHHHIGDSHQCHHMFSQMPFYNAVEATKYLKAKLGKYYIFDDTPIAKALYRNWRECKFVEDEGDVVFYKH

SEQ ID NO: 240 - protein, 403 aa, Artificial sequence
  Delta-15 Desaturase
MAPPHVVDEQVRRRIVVEDEIKSKKQFERNYVPMDFTIKEIRDAIPAHLFIRDTTKSILHVVKDLVTIAIVFYCATFIETLPSLALRVPAWITYWIIQGTVMVGPWILAHECGHGAFSNSRSFNTIFGWVLHSALLVPYQAWAMSHSKHHKFTGDMKKDLVFIPATRSYKGLPALEKPAVEEEVSEQEHHHHEESIFAETPIYTLGALLFVLTFGWPLYLIVNFSGHEAPHWVNHFQTVAPLYEPHQRKNIFYSNCGIVAMGSILTYLSMVFSPLTVFMYYGIPYLGVNAWIVCITYLQHTDPKVPHFRDNEWNFQRGAACTIDRSFGTIVNHLHHHIGDSHQCHHMFSQMPFYNAVEATKYLKAKLGKYYIFDDTPIAKALYRNWRECKFVEDEGDVVFYKH

SEQ ID NO: 241 - protein, 403 aa, Artificial sequence
  Delta-15 Desaturase
MAPPHVVDEQVRRRIVVEDEIKSKKQFERNYVPMDFTIKEIRDAIPAHLFIRDTTKSILHVVKDLVTIAIVFYCATFIETLPSLALRVPAWITYWIIQGTVMVGPWILAHECGHGAFSKPTSFNSIIGWVLHSALLVPYQAWAMSHSKHHKGTGSMTKDVVFIPATRSYKGLPALEKPAVEEEVSEQEHHHHEESIFAETPIYTLGALLFVLTFGWPLYLIVNFSGHEAPHWVNHFQTVAPLYEPHQRKNIFYSNCGIVAMGSILTYLSMVFSPLTVFMYYGIPYLGVNAWIVCITYLQHTDPKVPHFRDNEWNFQRGAACTIDRSFGTIVNHLHHHIGDSHQCHHMFSQMPFYNAVEATKYLKAKLGKYYIFDDTPIAKALYRNWRECKFVEDEGDVVFYKH

SEQ ID NO: 242 - protein, 403 aa, Artificial sequence
  Delta-15 Desaturase
MAPPHVVDEQVRRRIVVEDEIKSKKQFERNYVPMDFTIKEIRDAIPAHLFIRDTTKSILHVVKDLVTIAIVFYCATFIETLPSLALRVPAWITYWIIQGTVMVGPWILAHECGHGAFSNYKTFNYIFGWVLHSALLVPYQAWAMSHSKHHKGTGSMTKDVVFIPATRSYKGLPALEKPAVEEEVSEQEHHHHEESIFAETPIYTLGALLFVLTFGWPLYLIVNFSGHEAPHWVNHFQTVAPLYEPHQRKNIFYSNCGIVAMGSILTYLSMVFSPLTVFMYYGIPYLGVNAWIVCITYLQHTDPKVPHFRDNEWNFQRGAACTIDRSFGTIVNHLHHHIGDSHQCHHMFSQMPFYNAVEATKYLKAKLGKYYIFDDTPIAKALYRNWRECKFVEDEGDVVFYKH

SEQ ID NO: 243 - protein, 403 aa, Artificial sequence
  Delta-15 Desaturase
MAPPHVVDEQVRRRIVVEDEIKSKKQFERNYVPMDFTIKEIRDAIPAHLFIRDTTKSILHVVKDLVTIAIVFYCATFIETLPSLALRVPAWITYWIIQGTVMVGPWILAHECGHGAFSQYKSINNIIGWVLHSALLVPYQAWAMSHSKHHKGTGSMTKDVVFIPATRSYKGLPALEKPAVEEEVSEQEHHHHEESIFAETPIYTLGALLFVLTFGWPLYLIVNFSGHEAPHWVNHFQTVAPLYEPHQRKNIFYSNCGIVAMGSILTYLSMVFSPLTVFMYYGIPYLGVNAWIVCITYLQHTDPKVPHFRDNEWNFQRGAACTIDRSFGTIVNHLHHHIGDSHQCHHMFSQMPFYNAVEATKYLKAKLGKYYIFDDTPIAKALYRNWRECKFVEDEGDVVFYKH

SEQ ID NO: 244 - protein, 403 aa, Artificial sequence
  Delta-15 Desaturase
MAPPHVVDEQVRRRIVVEDEIKSKKQFERNYVPMDFTIKEIRDAIPAHLFIRDTTKSILHVVKDLVTIAIVFYCATFIETLPSLALRVPAWITYWIIQGTVMVGPWILAHECGHGAFSDYKSFNYIIGWVLHSALLVPYQAWAMSHSKHHKGTGSMTKDVVFIPATRSYKGLPALEKPAVEEEVSEQEHHHHEESIFAETPIYTLGALLFVLTFGWPLYLIVNFSGHEAPHWVNHFQTVAPLYEPHQRKNIFYSNCGIVAMGSILTYLSMVFSPLTVFMYYGIPYLGVNAWIVCITYLQHTDPKVPHFRDNEWNFQRGAACTIDRSFGTIVNHLHHHIGDSHQCHHMFSQMPFYNAVEATKYLKAKLGKYYIFDDTPIAKALYRNWRECKFVEDEGDVVFYKH

SEQ ID NO: 245 - protein, 403 aa, Artificial sequence
  Delta-15 Desaturase
MAPPHVVDEQVRRRIVVEDEIKSKKQFERNYVPMDFTIKEIRDAIPAHLFIRDTTKSILHVVKDLVTIAIVFYCATFIETLPSLALRVPAWITYWIIQGTVMVGPWILAHECGHGAFSNYKSINYIFGWVLHSALLVPYQAWAMSHSKHHKSTGHMAKDLVFIPATRSYKGLPALEKPAVEEEVSEQEHHHHEESIFAETPIYTLGALLFVLTFGWPLYLIVNFSGHEAPHWVNHFQTVAPLYEPHQRKNIFYSNCGIVAMGSILTYLSMVFSPLTVFMYYGIPYLGVNAWIVCITYLQHTDPKVPHFRDNEWNFQRGAACTIDRSFGTIVNHLHHHIGDSHQCHHMFSQMPFYNAVEATKYLKAKLGKYYIFDDTPIAKALYRNWRECKFVEDEGDVVFYKH

SEQ ID NO: 246 - protein, 403 aa, Artificial sequence
  Delta-15 Desaturase
MAPPHVVDEQVRRRIVVEDEIKSKKQFERNYVPMDFTIKEIRDAIPAHLFIRDTTKSILHVVKDLVTIAIVFYCATFIETLPSLALRVPAWITYWIIQGTVMVGPWILAHECGHGAFSKPKRFNTIMGWVLHSALLVPYQAWAMSHSKHHKGTGSMTKDVVFIPATRSYKGLPALEKPAVEEEVSEQEHHHHEESIFAETPIYTLGALLFVLTFGWPLYLIVNFSGHEAPHWVNHFQTVAPLYEPHQRKNIFYSNCGIVAMGSILTYLSMVFSPLTVFMYYGIPYLGVNAWIVCITYLQHTDPKVPHFRDNEWNFQRGAACTIDRSFGTIVNHLHHHIGDSHQCHHMFSQMPFYNAVEATKYLKAKLGKYYIFDDTPIAKALYRNWRECKFVEDEGDVVFYKH

SEQ ID NO: 247 - protein, 403 aa, Artificial sequence
  Delta-15 Desaturase
MAPPHVVDEQVRRRIVVEDEIKSKKQFERNYVPMDFTIKEIRDAIPAHLFIRDTTKSILHVVKDLVTIAIVFYCATFIETLPSLALRVPAWITYWIIQGTVMVGPWILAHECGHGAFSDPKSFNSIIGWVLHSALLVPYQAWAMSHSKHHKGTGSMTKDVVFIPATRSYKGLPALEKPAVEEEVSEQEHHHHEESIFAETPIYTLGALLFVLTFGWPLYLIVNFSGHEAPHWVNHFQTVAPLYEPHQRKNIFYSNCGIVAMGSILTYLSMVFSPLTVFMYYGIPYLGVNAWIVCITYLQHTDPKVPHFRDNEWNFQRGAACTIDRSFGTIVNHLHHHIGDSHQCHHMFSQMPFYNAVEATKYLKAKLGKYYIFDDTPIAKALYRNWRECKFVEDEGDVVFYKH

SEQ ID NO: 248 - protein, 403 aa, Artificial sequence
  Delta-15 Desaturase
MAPPHVVDEQVRRRIVVEDEIKSKKQFERNYVPMDFTIKEIRDAIPAHLFIRDTTKSILHVVKDLVTIAIVFYCATFIETLPSLALRVPAWITYWIIQGTVMVGPWILAHECGHGAFSKHKSINTILGWVLHSALLVPYQAWAMSHSKHHKCTGSMTKDVVFIPATRSYKGLPALEKPAVEEEVSEQEHHHHEESIFAETPIYTLGALLFVLTFGWPLYLIVNFSGHEAPHWVNHFQTVAPLYEPHQRKNIFYSNCGIVAMGSILTYLSMVFSPLTVFMYYGIPYLGVNAWIVCITYLQHTDPKVPHFRDNEWNFQRGAACTIDRSFGTIVNHLHHHIGDSHQCHHMFSQMPFYNAVEATKYLKAKLGKYYIFDDTPIAKALYRNWRECKFVEDEGDVVFYKH

SEQ ID NO: 249 - protein, 403 aa, Artificial sequence
  Delta-15 Desaturase
MAPPHVVDEQVRRRIVVEDEIKSKKQFERNYVPMDFTIKEIRDAIPAHLFIRDTTKSILHVVKDLVTIAIVFYCATFIETLPSLALRVPAWITYWIIQGTVMVGPWILAHECGHGAFSEPKWINYIIGWVLHSALLVPYQAWAMSHSKHHKGTGSMTKDVVFIPATRSYKGLPALEKPAVEEEVSEQEHHHHEESIFAETPIYTLGALLFVLTFGWPLYLIVNFSGHEAPHWVNHFQTVAPLYEPHQRKNIFYSNCGIVAMGSILTYLSMVFSPLTVFMYYGIPYLGVNAWIVCITYLQHTDPKVPHFRDNEWNFQRGAACTIDRSFGTIVNHLHHHIGDSHQCHHMFSQMTFYNAVEATKYLKAKLGKYYIFDDTPIAKALYRNWRECKFVEDEGDVVFYKH

SEQ ID NO: 250 - protein, 403 aa, Artificial sequence
  Delta-15 Desaturase
MAPPHVVDEQVRRRIVVEDEIKSKKQFERNYVPMDFTIKEIRDAIPAHLFIRDTTKSILHVVKDLVTIAIVFYCATFIETLPSLALRVPAWITYWIIQGTVMVGPWILAHECGHGAFSQYTRINNIFGWVLHSALLVPYQAWAMSHSKHHKGTGSMTKDVVFIPATRSYKGLPALEKPAVEEEVSEQEHHHHEESIFAETPIYTLGALLFVLTFGWPLYLIVNFSGHEAPHWVNHFQTVAPLYEPHQRKNIFYSNCGIVAMGSILTYLSMVFSPLTVFMYYGIPYLGVNAWIVCITYLQHTDPKVPHFRDNEWNFQRGAACTIDRSFGTIVNHLHHHIGDSHQCHHMFSQMPFYNAVEATKYLKAKLGKYYIFDDTPIAKALYRNWRECKFVEDEGDVVFYKH

SEQ ID NO: 251 - protein, 403 aa, Artificial sequence
  Delta-15 Desaturase
MAPPHVVDEQVRRRIVVEDEIKSKKQFERNYVPMDFTIKEIRDAIPAHLFIRDTTKSILHVVKDLVTIAIVFYCATFIETLPSLALRVPAWITYWIIQGTVMVGPWILAHECGHGAFSKHKRINTIIGWVLHSALLVPYQAWAMSHSKHHKGTGSMTKDVVFIPATRSYKGLPALEKPAVEEEVSEQEHHHHEESIFAETPIYTLGALLFVLTFGWPLYLIVNFSGHEAPHWVNHFQTVAPLYEPHQRKNIFYSNCGIVAMGSILTYLSMVFSPLTVFMYYGIPYLGVNAWIVCITYLQHTDPKVPHFRDNEWNFQRGAACTIDRSFGTIVNHLHHHIGDSHQCHHMFSQMPFYNAVEATKYLKAKLGKYYIFDDTPIAKALYRNWRECKFVEDEGDVVFYKH

SEQ ID NO: 252 - protein, 403 aa, Artificial sequence
  Delta-15 Desaturase
MAPPHVVDEQVRRRIVVEDEIKSKKQFERNYVPMDFTIKEIRDAIPAHLFIRDTTKSILHVVKDLVTIAIVFYCATFIETLPSLALRVPAWITYWIIQGTVMVGPWILAHECGHGAFSHSTSINSIFGWVLHSALLVPYQAWAMSHSKHHKGTGSMTKDVVFIPATRSYKGLPALEKPAVEEEVSEQEHHHHEESIFAETPIYTLGALLFVLTFGWPLYLIVNFSGHEAPHWVNHFQTVAPLYEPHQRKNIFYSNCGIVAMGSILTYLSMVFSPLTVFMYYGIPYLGVNAWIVCITYLQHTDPKVPHFRDNEWNFQRGAACTIDRSFGTIVNHLHHHIGDSHQCHHMFSQMPFYNAVEATKYLKAKLGKYYIFDDTPIAKALYRNWRECKFVEDEGDVVFYKH

SEQ ID NO: 253 - protein, 403 aa, Artificial sequence
  Delta-15 Desaturase
MAPPHVVDEQVRRRIVVEDEIKSKKQFERNYVPMDFTIKEIRDAIPAHLFIRDTTKSILHVVKDLVTIAIVFYCATFIETLPSLALRVPAWITYWIIQGTVMVGPWILAHECGHGAFSKYRTFNTIIGWVLHSALLVPYQAWAMSHSKHHKYTGHMAKDIVFIPATRSYKGLPALEKPAVEEEVSEQEHHHHEESIFAETPIYTLGALLFVLTFGWPLYLIVNFSGHEAPHWVNHFQTVAPLYEPHQRKNIFYSNCGIVAMGSILTYLSMVFSPLTVFMYYGIPYLGVNAWIVCITYLQHTDPKVPHFRDNEWNFQRGAACTIDRSFGTIVNHLHHHIGDSHQCHHMFSQMPFYNAVEATKYLKAKLGKYYIFDDTPIAKALYRNWRECKFVEDEGDVVFYKH

SEQ ID NO: 254 - protein, 403 aa, Artificial sequence
  Delta-15 Desaturase
MAPPHVVDEQVRRRIVVEDEIKSKKQFERNYVPMDFTIKEIRDAIPAHLFIRDTTKSILHVVKDLVTIAIVFYCATFIETLPSLALRVPAWITYWIIQGTVMVGPWILAHECGHGAFSQHTTFNTIFGWVLHSALLVPYQAWAMSHSKHHKGTGSMTKDVVFIPATRSYKGLPALEKPAVEEEVSEQEHHHHEESIFAETPIYTLGALLFVLTFGWPLYLIVNFSGHEAPHWVNHFQTVAPLYEPHQRKNIFYSNCGIVAMGSILTYLSMVFSPLTVFMYYGIPYLGVNAWIVCITYLQHTDPKVPHFRDNEWNFQRGAACTIDRSFGTIVNHLHHHIGDSHQCHHMFSQMPFYNAVEATKYLKAKLGKYYIFDDTPIAKALYRNWRECKFVEDEGDVVFYKH

SEQ ID NO: 255 - protein, 403 aa, Artificial sequence
  Delta-15 Desaturase
MAPPHVVDEQVRRRIVVEDEIKSKKQFERNYVPMDFTIKEIRDAIPAHLFIRDTTKSILHVVKDLVTIAIVFYCATFIETLPSLALRVPAWITYWIIQGTVMVGPWILAHECGHGAFSESTSFNYIIGWVLHSALLVPYQAWAMSHSKHHKGTGSMTKDVVFIPATRSYKGLPALEKPAVEEEVSEQEHHHHEESIFAETPIYTLGALLFVLTFGWPLYLIVNFSGHEAPHWVNHFQTVAPLYEPHQRKNIFYSNCGIVAMGSILTYLSMVFSPLTVFMYYGIPYLGVNAWIVCITYLQHTDPKVPHFRDNEWNFQRGAACTIDRSFGTIVNHLHHHIGDSHQCHHMFSQMPFYNAVEATKYLKAKLGKYYIFDDTPIAKALYRNWRECKFVEDEGDVVFYKH

SEQ ID NO: 256 - protein, 403 aa, Artificial sequence
  Delta-15 Desaturase
MAPPHVVDEQVRRRIVVEDEIKSKKQFERNYVPMDFTIKEIRDAIPAHLFIRDTTKSILHVVKDLVTIAIVFYCATFIETLPSLALRVPAWITYWIIQGTVMVGPWILAHECGHGAFSNYRRFNSIIGWVLHSALLVPYQAWAMSHSKHHKGTGSMTKDVVFIPATRSYKGLPALEKPAVEEEVSEQEHHHHEESIFAETPIYTLGALLFVLTFGWPLYLIVNFSGHEAPHWVNHFQTVAPLYEPHQRKNIFYSNCGIVAMGSILTYLSMVFSPLTVFMYYGIPYLGVNAWIVCITYLQHTDPKVPHFRDNEWNFQRGAACTIDRSFGTIVNHLHHHIGDSHQCHHMFSQMPFYNAVEATKYLKAKLGKYYIFDDTPIAKALYRNWRECKFVEDEGDVVFYKH

SEQ ID NO: 257 - protein, 403 aa, Artificial sequence
  Delta-15 Desaturase
MAPPHVVDEQVRRRIVVEDEIKSKKQFERNYVPMDFTIKEIRDAIPAHLFIRDTTKSILHVVKDLVTIAIVFYCATFIETLPSLALRVPAWITYWIIQGTVMVGPWILAHECGHGAFSKYRWINNIFGWVLHSALLVPYQAWAMSHSKHHKGTGSMTKDVVFIPATRSYKGLPALEKPAVEEEVSEQEHHHHEESIFAETPIYTLGALLFVLTFGWPLYLIVNFSGHEAPHWVNHFQTVAPLYEPHQRKNIFYSNCGIVAMGSILTYLSMVFSPLTVFMYYGIPYLGVNAWIVCITYLQHTDPKVPHFRDNEWNFQRGAACTIDRSFGTIVNHLHHHIGDSHQCHHMFSQMPFYNAVEATKYLKAKLGKYYIFDDTPIAKALYRNWRECKFVEDEGDVVFYKH

SEQ ID NO: 258 - protein, 403 aa, Artificial sequence
  Delta-15 Desaturase
MAPPHVVDEQVRRRIVVEDEIKSKKQFERNYVPMDFTIKEIRDAIPAHLFIRDTTKSILHVVKDLVTIAIVFYCATFIETLPSLALRVPAWITYWIIQGTVMVGPWILAHECGHGAFSKPRSFNNILGWVLHSALLVPYQAWAMSHSKHHKCTGSMTKDVVFIPATRSYKGLPALEKPAVEEEVSEQEHHHHEESIFAETPIYTLGALLFVLTFGWPLYLIVNFSGHEAPHWVNHFQTVAPLYEPHQRKNIFYSNCGIVAMGSILTYLSMVFSPLTVFMYYGIPYLGVNAWIVCITYLQHTDPKVPHFRDNEWNFQRGAACTIDRSFGTIVNHLHHHIGDSHQCHHMFSQMPFYNAVEATKYLKAKLGKYYIFDDTPIAKALYRNWRECKFVEDEGDVVFYKH

SEQ ID NO: 259 - protein, 403 aa, Artificial sequence
  Delta-15 Desaturase
MAPPHVVDEQVRRRIVVEDEIKSKKQFERNYVPMDFTIKEIRDAIPAHLFIRDTTKSILHVVKDLVTIAIVFYCATFIETLPSLALRVPAWITYWIIQGTVMVGPWILAHECGHGAFSNHKWINSILGWVLHSALLVPYQAWAMSHSKHHKYTGHMSKDLVFIPATRSYKGLPALEKPAVEEEVSEQEHHHHEESIFAETPIYTLGALLFVLTFGWPLYLIVNFSGHEAPHWVNHFQTVAPLYEPHQRKNIFYSNCGIVAMGSILTYLSMVFSPLTVFMYYGIPYLGVNAWIVCITYLQHTDPKVPHFRDNEWNFQRGAACTIDRSFGTIVNHLHHHIGDSHQCHHMFSQMPFYNAVEATKYLKAKLGKYYIFDDTPIAKALYRNWRECKFVEDEGDVVFYKH

SEQ ID NO: 260 - protein, 403 aa, Artificial sequence
  Delta-15 Desaturase
MAPPHVVDEQVRRRIVVEDEIKSKKQFERNYVPMDFTIKEIRDAIPAHLFIRDTTKSILHVVKDLVTIAIVFYCATFIETLPSLALRVPAWITYWIIQGTVMVGPWILAHECGHGAFSKHTRINTIFGWVLHSALLVPYQAWAMSHSKHHKSTGNMAKDMVFIPATRSYKGLPALEKPAVEEEVSEQEHHHHEESIFAETPIYTLGALLFVLTFGWPLYLIVNFSGHEAPHWVNHFQTVAPLYEPHQRKNIFYSNCGIVAMGSILTYLSMVFSPLTVFMYYGIPYLGVNAWIVCITYLQHTDPKVPHFRDNEWNFQRGAACTIDRSFGTIVNHLHHHIGDSHQCHHMFSQMPFYNAVEATKYLKAKLGKYYIFDDTPIAKALYRNWRECKFVEDEGDVVFYKH

SEQ ID NO: 261 - protein, 403 aa, Artificial sequence
  Delta-15 Desaturase
MAPPHVVDEQVRRRIVVEDEIKSKKQFERNYVPMDFTIKEIRDAIPAHLFIRDTTKSILHVVKDLVTIAIVFYCATFIETLPSLALRVPAWITYWIIQGTVMVGPWILAHECGHGAFSKPTSFNSIFGWVLHSALLVPYQAWAMSHSKHHKGTGSMTKDVVFIPATRSYKGLPALEKPAVEEEVSEQEHHHHEESIFAETPIYTLGALLFVLTFGWPLYLIVNFSGHEAPHWVNHFQTVAPLYEPHQRKNIFYSNCGIVAMGSILTYLSMVFSPLTVFMYYGIPYLGVNAWIVCITYLQHTDPKVPHFRDNEWNFQRGAACTIDRSFGTIVNHLHHHIGDSHQCHHMFSQMPFYNAVEATKYLKAKLGKYYIFDDTPIAKALYRNWRECKFVEDEGDVVFYKH

SEQ ID NO: 262 - protein, 403 aa, Artificial sequence
  Delta-15 Desaturase
MAPPHVVDEQVRRRIVVEDEIKSKKQFERNYVPMDFTIKEIRDAIPAHLFIRDTTKSILHVVKDLVTIAIVFYCATFIETLPSLALRVPAWITYWIIQGTVMVGPWILAHECGHGAFSKYKSFNNILGWVLHSALLVPYQAWAMSHSKHHKYTGDMSKDLVFIPATRSYKGLPALEKPAVEEEVSEQEHHHHEESIFAETPIYTLGALLFVLTFGWPLYLIVNFSGHEAPHWVNHFQTVAPLYEPHQRKNIFYSNCGIVAMGSILTYLSMVFSPLTVFMYYGIPYLGVNAWIVCITYLQHTDPKVPHFRDNEWNFQRGAACTIDRSFGTIVNHLHHHIGDSHQCHHMFSQMPFYNAVEATKYLKAKLGKYYIFDDTPIAKALYRNWRECKFVEDEGDVVFYKH

SEQ ID NO: 263 - protein, 403 aa, Artificial sequence; identical to SEQ ID NO: 155
  Delta-15 Desaturase

SEQ ID NO: 264 - protein, 403 aa, Artificial sequence
  Delta-15 Desaturase
MAPPHVVDEQVRRRIVVEDEIKSKKQFERNYVPMDFTIKEIRDAIPAHLFIRDTTKSILHVVKDLVTIAIVFYCATFIETLPSLALRVPAWITYWIIQGTVMVGPWILAHECGHGAFSESRSFNTIMGWVLHSALLVPYQAWAMSHSKHHKGTGSMTKDVVFIPATRSYKGLPALEKPAVEEEVSEQEHHHHEESIFAETPIYTLGALLFVLTFGWPLYLIVNFSGHEAPHWVNHFQTVAPLYEPHQRKNIFYSNCGIVAMGSILTYLSMVFSPLTVFMYYGIPYLGVNAWIVCITYLQHTDPKVPHFRDNEWNFQRGAACTIDRSFGTIVNHLHHHIGDSHQCHHMFSQMPFYNAVEATKYLKAKLGKYYIFDDTPIAKALYRNWRECKFVEDEGDVVFYKH

SEQ ID NO: 265 - protein, 403 aa, Artificial sequence
  Delta-15 Desaturase
MAPPHVVDEQVRRRIVVEDEIKSKKQFERNYVPMDFTIKEIRDAIPAHLFIRDTTKSILHVVKDLVTIAIVFYCATFIETLPSLALRVPAWITYWIIQGTVMVGPWILAHECGHGAFSNYTTINNIIGWVLHSALLVPYQAWAMSHSKHHKFTGNMSKDIVFIPATRSYKGLPALEKPAVEEEVSEQEHHHHEESIFAETPIYTLGALLFVLTFGWPLYLIVNFSGHEAPHWVNHFQTVAPLYEPHQRKNIFYSNCGIVAMGSILTYLSMVFSPLTVFMYYGIPYLGVNAWIVCITYLQHTDPKVPHFRDNEWNFQRGAACTIDRSFGTIVNHLHHHIGDSHQCHHMFSQMPFYNAVEATKYLKAKLGKYYIFDDTPIAKALYRNWRECKFVEDEGDVVFYKH

SEQ ID NO: 266 - protein, 403 aa, Artificial sequence
  Delta-15 Desaturase
MAPPHVVDEQVRRRIVVEDEIKSKKQFERNYVPMDFTIKEIRDAIPAHLFIRDTTKSILHVVKDLVTIAIVFYCATFIETLPSLALRVPAWITYWIIQGTVMVGPWILAHECGHGAFSKPKRFNNIIGWVLHSALLVPYQAWAMSHSKHHKGTGSMTKDVVFIPATRSYKGLPALEKPAVEEEVSEQEHHHHEESIFAETPIYTLGALLFVLTFGWPLYLIVNFSGHEAPHWVNHFQTVAPLYEPHQRKNIFYSNCGIVAMGSILTYLSMVFSPLTVFMYYGIPYLGVNAWIVCITYLQHTDPKVPHFRDNEWNFQRGAACTIDRSFGTIVNHLHHHIGDSHQCHHMFSQMPFYNAVEATKYLKAKLGKYYIFDDTPIAKALYRNWRECKFVEDEGDVVFYKH

SEQ ID NO: 267 - protein, 403 aa, Artificial sequence
  Delta-15 Desaturase
MAPPHVVDEQVRRRIVVEDEIKSKKQFERNYVPMDFTIKEIRDAIPAHLFIRDTTKSILHVVKDLVTIAIVFYCATFIETLPSLALRVPAWITYWIIQGTVMVGPWILAHECGHGAFSNPTRFNNILGWVLHSALLVPYQAWAMSHSKHHKGTGSMTKDVVFIPATRSYKGLPALEKPAVEEEVSEQEHHHHEESIFAETPIYTLGALLFVLTFGWPLYLIVNFSGHEAPHWVNHFQTVAPLYEPHQRKNIFYSNCGIVAMGSILTYLSMVFSPLTVFMYYGIPYLGVNAWIVCITYLQHTDPKVPHFRDNEWNFQRGAACTIDRSFGTIVNHLHHHIGDSHQCHHMFSQMPFYNAVEATKYLKAKLGKYYIFDDTPIAKALYRNWRECKFVEDEGDVVFYKH

SEQ ID NO: 268 - protein, 403 aa, Artificial sequence
  Delta-15 Desaturase
MAPPHVVDEQVRRRIVVEDEIKSKKQFERNYVPMDFTIKEIRDAIPAHLFIRDTTKSILHVVKDLVTIAIVFYCATFIETLPSLALRVPAWITYWIIQGTVMVGPWILAHECGHGAFSEYTSFNNIFGWVLHSALLVPYQAWAMSHSKHHKGTGSMTKDVVFIPATRSYKGLPALEKPAVEEEVSEQEHHHHEESIFAETPIYTLGALLFVLTFGWPLYLIVNFSGHEAPHWVNHFQTVAPLYEPHQRKNIFYSNCGIVAMGSILTYLSMVFSPLTVFMYYGIPYLGVNAWIVCITYLQHTDPKVPHFRDNEWNFQRGAACTIDRSFGTIVNHLHHHIGDSHQCHHMFSQMPFYNAVEATKYLKAKLGKYYIFDDTPIAKALYRNWRECKFVEDEGDVVFYKH

SEQ ID NO: 269 - protein, 403 aa, Artificial sequence
  Delta-15 Desaturase
MAPPHVVDEQVRRRIVVEDEIKSKKQFERNYVPMDFTIKEIRDAIPAHLFIRDTTKSILHVVKDLVTIAIVFYCATFIETLPSLALRVPAWITYWIIQGTVMVGPWILAHECGHGAFSKYRTFNTIIGWVLHSALLVPYQAWAMSHSKHHKGTGSMTKDVVFIPATRSYKGLPALEKPAVEEEVSEQEHHHHEESIFAETPIYTLGALLFVLTFGWPLYLIVNFSGHEAPHWVNHFQTVAPLYEPHQRKNIFYSNCGIVAMGSILTYLSMVFSPLTVFMYYGIPYLGVNAWIVCITYLQHTDPKVPHFRDNEWNFQRGAACTIDRSFGTIVNHLHHHIGDSHQCHHMFSQMPFYNAVEATKYLKAKLGKYYIFDDTPIAKALYRNWRECKFVEDEGDVVFYKH

SEQ ID NO: 270 - protein, 403 aa, Artificial sequence
  Delta-15 Desaturase
MAPPHVVDEQVRRRIVVEDEIKSKKQFERNYVPMDFTIKEIRDAIPAHLFIRDTTKSILHVVKDLVTIAIVFYCATFIETLPSLALRVPAWITYWIIQGTVMVGPWILAHECGHGAFSKYRWFNTIIGWVLHSALLVPYQAWAMSHSKHHKGTGSMTKDVVFIPATRSYKGLPALEKPAVEEEVSEQEHHHHEESIFAETPIYTLGALLFVLTFGWPLYLIVNFSGHEAPHWVNHFQTVAPLYEPHQRKNIFYSNCGIVAMGSILTYLSMVFSPLTVFMYYGIPYLGVNAWIVCITYLQHTDPKVPHFRDNEWNFQRGAACTIDRSFGTIVNHLHHHIGDSHQCHHMFSQMPFYNAVEATKYLKAKLGKYYIFDDTPIAKALYRNWRECKFVEDEGDVVFYKH

SEQ ID NO: 271 - protein, 403 aa, Artificial sequence
  Delta-15 Desaturase
MAPPHVVDEQVRRRIVVEDEIKSKKQFERNYVPMDFTIKEIRDAIPAHLFIRDTTKSILHVVKDLVTIAIVFYCATFIETLPSLALRVPAWITYWIIQGTVMVGPWILAHECGHGAFSQPTTINYILGWVLHSALLVPYQAWAMSHSKHHKDTGNMAKDLVFIPATRSYKGLPALEKPAVEEEVSEQEHHHHEESIFAETPIYTLGALLFVLTFGWPLYLIVNFSGHEAPHWVNHFQTVAPLYEPHQRKNIFYSNCGIVAMGSILTYLSMVFSPLTVFMYYGIPYLGVNAWIVCITYLQHTDPKVPHFRDNEWNFQRGAACTIDRSFGTIVNHLHHHIGDSHQCHHMFSQMPFYNAVEATKYLKAKLGKYYIFDDTPIAKALYRNWRECKFVEDEGDVVFYKH

SEQ ID NO: 272 - protein, 403 aa, Artificial sequence
  Delta-15 Desaturase
MAPPHVVDEQVRRRIVVEDEIKSKKQFERNYVPMDFTIKEIRDAIPAHLFIRDTTKSILHVVKDLVTIAIVFYCATFIETLPSLALRVPAWITYWIIQGTVMVGPWILAHECGHGAFSEYTSINYILGWVLHSALLVPYQAWAMSHSKHHKGTGTMSKDVVFIPATRSYKGLPALEKPAVEEEVSEQEHHHHEESIFAETPIYTLGALLFVLTFGWPLYLIVNFSGHEAPHWVNHFQTVAPLYEPHQRKNIFYSNCGIVAMGSILTYLSMVFSPLTVFMYYGIPYLGVNAWIVCITYLQHTDPKVPHFRDNEWNFQRGAACTIDRSFGTIVNHLHHHIGDSHQCHHMFSQMPFYNAVEATKYLKAKLGKYYIFDDTPIAKALYRNWRECKFVEDEGDVVFYKH

SEQ ID NO: 273 - protein, 403 aa, Artificial sequence
  Delta-15 Desaturase
MAPPHVVDEQVRRRIVVEDEIKSKKQFERNYVPMDFTIKEIRDAIPAHLFIRDTTKSILHVVKDLVTIAIVFYCATFIETLPSLALRVPAWITYWIIQGTVMVGPWILAHECGHGAFSQHKRINYIFGWVLHSALLVPYQAWAMSHSKHHKATGNMKKDVVFIPATRSYKGLPALEKPAVEEEVSEQEHHHHEESIFAETPIYTLGALLFVLTFGWPLYLIVNFSGHEAPHWVNHFQTVAPLYEPHQRKNIFYSNCGIVAMGSILTYLSMVFSPLTVFMYYGIPYLGVNAWIVCITYLQHTDPKVPHFRDNEWNFQRGAACTIDRSFGTIVNHLHHHIGDSHQCHHMFSQMPFYNAVEATKYLKAKLGKYYIFDDTPIAKALYRNWRECKFVEDEGDVVFYKH

SEQ ID NO: 274 - protein, 403 aa, Artificial sequence
  Delta-15 Desaturase
MAPPHVVDEQVRRRIVVEDEIKSKKQFERNYVPMDFTIKEIRDAIPAHLFIRDTTKSILHVVKDLVTIAIVFYCATFIETLPSLALRVPAWITYWIIQGTVMVGPWILAHECGHGAFSDSKTINTIFGWVLHSALLVPYQAWAMSHSKHHKGTGSMTKDVVFIPATKWVGDLPTLEKPAVEEEVSEQEHHHHEESIFAETPIYTLGALLFVLTFGWPLYLIVNFSGHEAPHWVNHFQTVAPLYEPHQRKNIFYSNCGIVAMGSILTYLSMVFSPLTVFMYYGIPYLGVNAWIVCITYLQHTDPKVPHFRDNEWNFQRGAACTIDRSFGTIVNHLHHHIGDSHQCHHMFSQMPFYNAVEATKYLKAKLGKYYIFDDTPIAKALYRNWRECKFVEDEGDVVFYKH

SEQ ID NO: 275 - protein, 403 aa, Artificial sequence
  Delta-15 Desaturase
MAPPHVVDEQVRRRIVVEDEIKSKKQFERNYVPMDFTIKEIRDAIPAHLFIRDTTKSILHVVKDLVTIAIVFYCATFIETLPSLALRVPAWITYWIIQGTVMVGPWILAHECGHGAFSDSKTINTIFGWVLHSALLVPYQAWAMSHSKHHKGTGSMTKDVVFIPATGAYGDARALEKPAVEEEVSEQEHHHHEESIFAETPIYTLGALLFVLTFGWPLYLIVNFSGHEAPHWVNHFQTVAPLYEPHQRKNIFYSNCGIVAMGSILTYLSMVFSPLTVFMYYGIPYLGVNAWIVCITYLQHTDPKVPHFRDNEWNFQRGAACTIDRSFGTIVNHLHHHIGDSHQCHHMFSQMPFYNAVEATKYLKAKLGKYYIFDDTPIAKALYRNWRECKFVEDEGDVVFYKH

SEQ ID NO: 276 - protein, 403 aa, Artificial sequence
  Delta-15 Desaturase
MAPPHVVDEQVRRRIVVEDEIKSKKQFERNYVPMDFTIKEIRDAIPAHLFIRDTTKSILHVVKDLVTIAIVFYCATFIETLPSLALRVPAWITYWIIQGTVMVGPWILAHECGHGAFSDSKTINTIFGWVLHSALLVPYQAWAMSHSKHHKGTGSMTKDVVFIPATGRLEDLPDLEKPAVEEEVSEQEHHHHEESIFAETPIYTLGALLFVLTFGWPLYLIVNFSGHEAPHWVNHFQTVAPLYEPHQRKNIFYSNCGIVAMGSILTYLSMVFSPLTVFMYYGIPYLGVNAWIVCITYLQHTDPKVPHFRDNEWNFQRGAACTIDRSFGTIVNHLHHHIGDSHQCHHMFSQMPFYNAVEATKYLKAKLGKYYIFDDTPIAKALYRNWRECKFVEDEGDVVFYKH

SEQ ID NO: 277 - protein, 403 aa, Artificial sequence
  Delta-15 Desaturase
MAPPHVVDEQVRRRIVVEDEIKSKKQFERNYVPMDFTIKEIRDAIPAHLFIRDTTKSILHVVKDLVTIAIVFYCATFIETLPSLALRVPAWITYWIIQGTVMVGPWILAHECGHGAFSDSKTINTIFGWVLHSALLVPYQAWAMSHSKHHKGTGSMTKDVVFIPATGWLRGIPNLEKPAVEEEVSEQEHHHHEESIFAETPIYTLGALLFVLTFGWPLYLIVNFSGHEAPHWVNHFQTVAPLYEPHQRKNIFYSNCGIVAMGSILTYLSMVFSPLTVFMYYGIPYLGVNAWIVCITYLQHTDPKVPHFRDNEWNFQRGAACTIDRSFGTIVNHLHHHIGDSHQCHHMFSQMPFYNAVEATKYLKAKLGKYYIFDDTPIAKALYRNWRECKFVEDEGDVVFYKH

SEQ ID NO: 278 - protein, 403 aa, Artificial sequence
  Delta-15 Desaturase
MAPPHVVDEQVRRRIVVEDEIKSKKQFERNYVPMDFTIKEIRDAIPAHLFIRDTTKSILHVVKDLVTIAIVFYCATFIETLPSLALRVPAWITYWIIQGTVMVGPWILAHECGHGAFSKHRRFNTIFGWVLHSALLVPYQAWAMSHSKHHKYTGDMKKDLVFIPATRSYKGLPALEKPAVEEEVSEQEHHHHEESIFAETPIYTLGALLFVLTFGWPLYLIVNFSGHEAPHWVNHFQTVAPLYEPHQRKNIFYSNCGIVAMGSILTYLSMVFSPLTVFMYYGIPYLGVNAWIVCITYLQHTDPKVPHFRDNEWNFQRGAACTIDRSFGTIVNHLHHHIGDSHQCHHMFSQMPFYNAVEATKYLKAKLGKYYIFDDTPIAKALYRNWRECKFVEDEGDVVFYKH

SEQ ID NO: 279 - protein, 403 aa, Artificial sequence
  Delta-15 Desaturase
MAPPHVVDEQVRRRIVVEDEIKSKKQFERNYVPMDFTIKEIRDAIPAHLFIRDTTKSILHVVKDLVTIAIVFYCATFIETLPSLALRVPAWITYWIIQGTVMVGPWILAHECGHGAFSDSKTINTIFGWVLHSALLVPYQAWAMSHSKHHKGTGSMTKDVVFIPATETDRSLRNLEKPAVEEEVSEQEHHHHEESIFAETPIYTLGALLFVLTFGWPLYLIVNFSGHEAPHWVNHFQTVAPLYEPHQRKNIFYSNCGIVAMGSILTYLSMVFSPLTVFMYYGIPYLGVNAWIVCITYLQHTDPKVPHFRDNEWNFQRGAACTIDRSFGTIVNHLHHHIGDSHQCHHMFSQMPFYNAVEATKYLKAKLGKYYIFDDTPIAKALYRNWRECKFVEDEGDVVFYKH

SEQ ID NO: 280 - protein, 403 aa, Artificial sequence
  Delta-15 Desaturase
MAPPHVVDEQVRRRIVVEDEIKSKKQFERNYVPMDFTIKEIRDAIPAHLFIRDTTKSILHVVKDLVTIAIVFYCATFIETLPSLALRVPAWITYWIIQGTVMVGPWILAHECGHGAFSDSKTINTIFGWVLHSALLVPYQAWAMSHSKHHKGTGSMTKDVVFIPATGALGNPPNLEKPAVEEEVSEQEHHHHEESIFAETPIYTLGALLFVLTFGWPLYLIVNFSGHEAPHWVNHFQTVAPLYEPHQRKNIFYSNCGIVAMGSILTYLSMVFSPLTVFMYYGIPYLGVNAWIVCITYLQHTDPKVPHFRDNEWNFQRGAACTIDRSFGTIVNHLHHHIGDSHQCHHMFSQMPFYNAVEATKYLKAKLGKYYIFDDTPIAKALYRNWRECKFVEDEGDVVFYKH

SEQ ID NO: 281 - protein, 403 aa, Artificial sequence
  Delta-15 Desaturase
MAPPHVVDEQVRRRIVVEDEIKSKKQFERNYVPMDFTIKEIRDAIPAHLFIRDTTKSILHVVKDLVTIAIVFYCATFIETLPSLALRVPAWITYWIIQGTVMVGPWILAHECGHGAFSDSKTINTIFGWVLHSALLVPYQAWAMSHSKHHKGTGSMTKDVVFIPATDTLGSVRNLEKPAVEEEVSEQEHHHHEESIFAETPIYTLGALLFVLTFGWPLYLIVNFSGHEAPHWVNHFQTVAPLYEPHQRKNIFYSNCGIVAMGSILTYLSMVFSPLTVFMYYGIPYLGVNAWIVCITYLQHTDPKVPHFRDNEWNFQRGAACTIDRSFGTIVNHLHHHIGDSHQCHHMFSQMPFYNAVEATKYLKAKLGKYYIFDDTPIAKALYRNWRECKFVEDEGDVVFYKH

SEQ ID NO: 282 - protein, 403 aa, Artificial sequence
  Delta-15 Desaturase
MAPPHVVDEQVRRRIVVEDEIKSKKQFERNYVPMDFTIKEIRDAIPAHLFIRDTTKSILHVVKDLVTIAIVFYCATFIETLPSLALRVPAWITYWIIQGTVMVGPWILAHECGHGAFSKHTTFNNIFGWVLHSALLVPYQAWAMSHSKHHKYTGHMSKDLVFIPATRSYKGLPALEKPAVEEEVSEQEHHHHEESIFAETPIYTLGALLFVLTFGWPLYLIVNFSGHEAPHWVNHFQTVAPLYEPHQRKNIFYSNCGIVAMGSILTYLSMVFSPLTVFMYYGIPYLGVNAWIVCITYLQHTDPKVPHFRDNEWNFQRGAACTIDRSFGTIVNHLHHHIGDSHQCHHMFSQMPFYNAVEATKYLKAKLGKYYILDDTPIAKALYRNWRECKFVEDEGDVVFYKH

SEQ ID NO: 283 - protein, 403 aa, Artificial sequence
  Delta-15 Desaturase
MAPPHVVDEQVRRRIVVEDEIKSKKQFERNYVPMDFTIKEIRDAIPAHLFIRDTTKSILHVVKDLVTIAIVFYCATFIETLPSLALRVPAWITYWIIQGTVMVGPWILAHECGHGAFSKPTTINTILGWVLHSALLVPYQAWAMSHSKHHKGTGSMTKDVVFIPATRSYKGLPALEKPAVEEEVSEQEHHHHEESIFAETPIYTLGALLFVLTFGWPLYLIVNFSGHEAPHWVNHFQTVAPLYEPHQRKNIFYSNCGIVAMGSILTYLSMVFSPLTVFMYYGIPYLGVNAWIVCITYLQHTDPKVPHFRDNEWNFQRGAACTIDRSFGTIVNHLHHHIGDSHQCHHMFSQMPFYNAVEATKYLKAKLGKYYIFDDTPIAKALYRNWRECKFVEDEGDVVFYKH

SEQ ID NO: 284 - protein, 403 aa, Artificial sequence
  Delta-15 Desaturase
MAPPHVVDEQVRRRIVVEDEIKSKKQFERNYVPMDFTIKEIRDAIPAHLFIRDTTKSILHVVKDLVTIAIVFYCATFIETLPSLALRVPAWITYWIIQGTVMVGPWILAHECGHGAFSESRRFNSILGWVLHSALLVPYQAWAMSHSKHHKYTGAMSKDVVFIPATRSYKGLPALEKPAVEEEVSEQEHHHHEESIFAETPIYTLGALLFVLTFGWPLYLIVNFSGHEAPHWVNHFQTVAPLYEPHQRKNIFYSNCGIVAMGSILTYLSMVFSPLTVFMYYGIPYLGVNAWIVCITYLQHTDPKVPHFRDNEWNFQRGAACTIDRSFGTIVNHLHHHIGDSHQCHHMFSQMPFYNAVEATKYLKAKLGKYYIFDDTPIAKALYRNWRECKFVEDEGDVVFYKH

SEQ ID NO: 285 - protein, 403 aa, Artificial sequence
  Delta-15 Desaturase
MAPPHVVDEQVRRRIVVEDEIKSKKQFERNYVPMDFTIKEIRDAIPAHLFIRDTTKSILHVVKDLVTIAIVFYCATFIETLPSLALRVPAWITYWIIQGTVMVGPWILAHECGHGAFSDSKTINTIFGWVLHSALLVPYQAWAMSHSKHHKATGNMAKDMVFIPATRSYKGLPALEKPAVEEEVSEQEHHHHEESIFAETPIYTLGALLFVLTFGWPLYLIVNFSGHEAPHWVNHFQTVAPLYEPHQRKNIFYSNCGIVAMGSILTYLSMVFSPLTVFMYYGIPYLGVNAWIVCITYLQHTDPKVPHFRDNEWNFQRGAACTIDRSFGTIVNHLHHHIGDSHQCHHMFSQMPFYNAVEATKYLKAKLGKYYIFDDTPIAKALYRNWRECKFVEDEGDVVFYKH

SEQ ID NO: 286 - protein, 403 aa, Artificial sequence
  Delta-15 Desaturase
MAPPHVVDEQVRRRIVVEDEIKSKKQFERNYVPMDFTIKEIRDAIPAHLFIRDTTKSILHVVKDLVTIAIVFYCATFIETLPSLALRVPAWITYWIIQGTVMVGPWILAHECGHGAFSDSKTINTIFGWVLHSALLVPYQAWAMSHSKHHKGTGSMTKDVVFIPATRSYKGLPALEKPAVEEEVSEQEHHHHEESIFAENPIYILITFIVVLTFGWPLYLIVNFSGHEAPHWVNHFQTVAPLYEPHQRKNIFYSNCGIVAMGSILTYLSMVFSPLTVFMYYGIPYLGVNAWIVCITYLQHTDPKVPHFRDNEWNFQRGAACTIDRSFGTIVNHLHHHIGDSHQCHHMFSQMPFYNAVEATKYLKAKLGKYYIFDDTPIAKALYRNWRECKFVEDEGDVVFYKH

SEQ ID NO: 287 - protein, 403 aa, Artificial sequence
  Delta-15 Desaturase
MAPPHVVDEQVRRRIVVEDEIKSKKQFERNYVPMDFTIKEIRDAIPAHLFIRDTTKSILHVVKDLVTIAIVFYCATFIETLPSLALRVPAWITYWIIQGTVMVGPWILAHECGHGAFSDSKTINTIFGWVLHSALLVPYQAWAMSHSKHHKGTGSMTKDVVFIPATRSYKGLPALEKPAVEEEVSEQEHHHHEESIFAETPIYTLITFIILLTFGWPLYLIVNFSGHEAPHWVNHFQTVAPLYEPHQRKNIFYSNCGIVAMGSILTYLSMVFSPLTVFMYYGIPYLGVNAWIVCITYLQHTDPKVPHFRDNEWNFQRGAACTIDRSFGTIVNHLHHHIGDSHQCHHMFSQMPFYNAVEATKYLKAKLGKYYIFDDTPIAKALYRNWRECKFVEDEGDVVFYKH

SEQ ID NO: 288 - protein, 403 aa, Artificial sequence
  Delta-15 Desaturase
MAPPHVVDEQVRRRIVVEDEIKSKKQFERNYVPMDFTIKEIRDAIPAHLFIRDTTKSILHVVKDLVTIAIVFYCATFIETLPSLALRVPAWITYWIIQGTVMVGPWILAHECGHGAFSQHKWINTILGWVLHSALLVPYQAWAMSHSKHHKFTGSMAKDLVFIPATRSYKGLPALEKPAVEEEVSEQEHHHHEESIFAETPIYTLGALLFVLTFGWPLYLIVNFSGHEAPHWVNHFQTVAPLYEPHQRKNIFYSNCGIVAMGSILTYLSMVFSPLTVFMYYGIPYLGVNAWIVCITYLQHTDPKVPHFRDNEWNFQRGAACTIDRSFGTIVNHLHHHIGDSHQCHHMFSQMPFYNAVEATKYLKAKLGKYYIFDDTPIAKALYRNWRECKFVEDEGDVVFYKH

SEQ ID NO: 289 - protein, 403 aa, Artificial sequence
  Delta-15 Desaturase
MAPPHVVDEQVRRRIVVEDEIKSKKQFERNYVPMDFTIKEIRDAIPAHLFIRDTTKSILHVVKDLVTIAIVFYCATFIETLPSLALRVPAWITYWIIQGTVMVGPWILAHECGHGAFSNHKTFNTIFGWVLHSALLVPYQAWAMSHSKHHKFTGSMAKDLVFIPATRSYKGLPALEKPAVEEEVSEQEHHHHEESIFAETPIYTLGALLFVLTFGWPLYLIVNFSGHEAPHWVNHFQTVAPLYEPHQRKNIFYSNCGIVAMGSILTYLSMVFSPLTVFMYYGIPYLGVNAWIVCITYLQHTDPKVPHFRDNEWNFQRGAACTIDRSFGTIVNHLHHHIGDSHQCHHMFSQMPFYNAVEATKYLKAKLGKYYIFDDTPIAKALYRNWRECKFVEDEGDVVFYKH

SEQ ID NO: 290 - protein, 403 aa, Artificial sequence
  Delta-15 Desaturase
MAPPHVVDEQVRRRIVVEDEIKSKKQFERNYVPMDFTIKEIRDAIPAHLFIRDTTKSILHVVKDLVTIAIVFYCATFIETLPSLALRVPAWITYWIIQGTVMVGPWILAHECGHGAFSNPKSFNNIFGWVLHSALLVPYQAWAMSHSKHHKDTGHMTKDVVFIPATRSYKGLPALEKPAVEEEVSEQEHHHHEESIFAETPIYTLGALLFVLTFGWPLYLIVNFSGHEAPHWVNHFQTVAPLYEPHQRKNIFYSNCGIVAMGSILTYLSMVFSPLTVFMYYGIPYLGVNAWIVCITYLQHTDPKVPHFRDNEWNFQRGAACTIDRSFGTIVNHLHHHIGDSHQCHHMFSQMPFYNAVEATKYLKAKLGKYYIFDDTPIAKALYRNWRECKFVEDEGDVVFYKH

SEQ ID NO: 291 - protein, 403 aa, Artificial sequence
  Delta-15 Desaturase
MAPPHVVDEQVRRRIVVEDEIKSKKQFERNYVPMDFTIKEIRDAIPAHLFIRDTTKSILHVVKDLVTIAIVFYCATFIETLPSLALRVPAWITYLIIQGTVMVGPWILAHECGHGAFSQHTRFNSIIGWVLHSALLVPYQAWAMSHSKHHKGTGSMEKDFVFIPATRSYKGLPALEKPAVEEEVSEQEHHHHEESIFAETPIYTLGALLFVLTFGWPLYLIVNFSGHEAPHWVNHFQTVAPLYEPHQRKNIFYSNCGIVAMGSILTYLSMVFSPLTVFMYYGIPYLGVNAWIVCITYLQHTDPKVPHFRDNEWNFQRGAACTIDRSFGTIVNHLHHHIGDSHQCHHMFSQMPFYNAVEATKYLKAKLGKYYIFDDTPIAKALYRNWRECKFVEDEGDVVFYKH

SEQ ID NO: 292 - protein, 403 aa, Artificial sequence
  Delta-15 Desaturase
MAPPHVVDEQVRRRIVVEDEIKSKKQFERNYVPMDFTIKEIRDAIPAHLFIRDTTKSILHVVKDLVTIAIVFYCATFIETLPSLALRVPAWITYWIIQGTVIVGPWILAHECGHGAFSKHTSFNNIIGWVLHSALLVPYQAWAMSHSKHHKGTGTMTKDVVFIPATRSYKGLPALEKPAVEEEVSEQEHHHHEESIFAETPIYTLGALLFVLTFGWPLYLIVNFSGHEAPHWVNHFQTVAPLYEPHQRKNIFYSNCGIVAMGSILTYLSMVFSPLTVFMYYGIPYLGVNAWIVCITYLQHTDPKVPHFRDNEWNFQRGAACTIDRSFGTIVNHLHHHIGDSHQCHHMFSQMPFYNAVEATKYLKAKLGKYYIFDDTPIAKALYRNWRECKFVEDEGDVVFYKH

SEQ ID NO: 293 - protein, 403 aa, Artificial sequence
  Delta-15 Desaturase
MAPPHVVDEQVRRRIVVEDEIKSKKQFERNYVPMDFTIKEIRDAIPAHLFIRDTTKSILHVVKDLVTIAIVFYCATFIETLPSLALRVPAWITYWIIQGTVMVGPWILAHECGHGAFSKHTRINNILGWVLHSALLVPYQAWAMSHSKHHKGTGSMKKDLVFIPATRSYKGLPALEKPAVEEEVSEQEHHHHEESIFAETPIYTLGALLFVLTFGWPLYLIVNFSGHEAPHWVNHFQTVAPLYEPHQRKNIFYSNCGIVAMGSILTYLSMVFSPLTVFMYYGIPYLGVNAWIVCITYLQHTDPKVPHFRDNEWNFQRGAACTIDRSFGTIVNHLHHHIGDSHQCHHMFSQMPFYNAVEATKYLKAKLGKYYIFDDTPIAKALYRNWRECKFVEDEGDVVFYKH

SEQ ID NO: 294 - protein, 403 aa, Artificial sequence
  Delta-15 Desaturase
MAPPHVVDEQVRRRIVVEDEIKSKKQFERNYVPMDFTIKEIRDAIPAHLFIRDTTKSILHVVKDLVTIAIVFYCATFIETLPSLALRVPAWITYWIIQGTVMVGPWILAHECGHGAFSKYKRINSIFGWVLHSALLVPYQAWAMSHSKHHKSTGNMQKDLVFIPATRSYKGLPALEKPAVEEEVSEQEHHHHEESIFAETPIYTLGALLFVLTFGWPLYLIVNFSGHEAPHWVNHFQTVAPLYEPHQRKNIFYSNCGIVAMGSILTYLSMVFSPLTVFMYYGIPYLGVNAWIVCITYLQHTDPKVPHFRDNEWNFQRGAACTIDRSFGTIVNHLHHHIGDSHQCHHMFSQMPFYNAVEATKYLKAKLGKYYIFDDTPIAKALYRNWRECKFVEDEGDVVFYKH

SEQ ID NO: 295 - protein, 403 aa, Artificial sequence
  Delta-15 Desaturase
MAPPHVVDEQVRRRIVVEDEIKSKKQFERNYVPMDFTIKEIRDAIPAHLFIRDTTKSILHVVKDLVTIAIVFYCATFIETLPSLALRVPAWITYWIIQGTVMVGPWILAHECGHGAFSESKWINSIFGWVLHSALLVPYQAWAMSHSKHHKGTGSMTKDFVFIPATRSYKGLPALEKPAVEEEVSEQEHHHHEESIFAETPIYTLGALLFVLTFGWPLYLIVNFSGHEAPHWVNHFQTVAPLYEPHQRKNIFYSNCGIVAMGSILTYLSMVFSPLTVFMYYGIPYLGVNAWIVCITYLQHTDPKVPHFRDNEWNFQRGAACTIDRSFGTIVNHLHHHIGDSHQCHHMFSQMPFYNAVEATKYLKAKLGKYYIFDDTPIAKALYRNWRECKFVEDEGDVVFYKH

SEQ ID NO: 296 - protein, 403 aa, Artificial sequence
  Delta-15 Desaturase
MAPPHVVDEQVRRRIVVEDEIKSKKQFERNYVPMDFTIKEIRDAIPAHLFIRDTTKSILHVVKDLVTIAIVFYCATFIETLPSLALRVPAWITYWIIQGTVMVGPWILAHECGHGAFSQPTSINTIMGWVLHSALLVPYQAWAMSHSKHHKGTGSMKKDMVFIPATRSYKCLPALEKPAVEEEVSEQEHHHHEESIFAETPIYTLGALLFVLTFGWPLYLIVNFSGHEAPHWVNHFQTVAPLYEPHQRKNIFYSNCGIVAMGSILTYLSMVFSPLTVFMYYGIPYLGVNAWIVCITYLQHTDPKVPHFRDNEWNFQRGAACTIDRSFGTIVNHLHHHIGDSHQCHHMFSQMPFYNAVEATKYLKAKLGKYYIFDDTPIAKALYRNWRECKFVEDEGDVVFYKH

SEQ ID NO: 297 - protein, 403 aa, Artificial sequence
  Delta-15 Desaturase
MAPPHVVDEQVRRRIVVEDEIKSKKQFERNYVPMDFTIKEIRDAIPAHLFIRDTTKSILHVVKDLVTIAIVFYCATFIETLPSLALRVPAWITYWIIQGTVMVGPWILAHECGHGAFSDPRWFNSIMGWVLHSALLVPYQAWAMSHSKHHKGTGSMKKDMVFIPATRSYKCLPALEKPAVEEEVSEQEHHHHEESIFAETPIYTLGALLFVLTFGWPLYLIVNFSGHEAPHWVNHFQTVAPLYEPHQRKNIFYSNCGIVAMGSILTYLSMVFSPLTVFMYYGIPYLGVNAWIVCITYLQHTDPKVPHFRDNEWNFQRGAACTIDRSFGTIVNHLHHHIGDSHQCHHMFSQMPFYNAVEATKYLKAKLGKYYIFDDTPIAKALYRNWRECKFVEDEGDVVFYKH

SEQ ID NO: 298 - protein, 403 aa, Artificial sequence
  Delta-15 Desaturase
MAPPHVVDEQVRRRIVVEDEIKSKKQFERNYVPMDFTIKEIRDAIPAHLFIRDTTKSILHVVKDLVTIAIVFYCATFIETLPSLALRVPAWITYWIIQGTVMVGPWILAHECGHGAFSEPTTINTIIGWVLHSALLVPYQAWAMSHSKHHKGTGSMKKDMVFIPATRSYKCLPALEKPAVEEEVSEQEHHHHEESIFAETPIYTLGALLFVLTFGWPLYLIVNFSGHEAPHWVNHFQTVAPLYEPHQRKNIFYSNCGIVAMGSILTYLSMVFSPLTVFMYYGIPYLGVNAWIVCITYLQHTDPKVPHFRDNEWNFQRGAACTIDRSFGTIVNHLHHHIGDSHQCHHMFSQMPFYNAVEATKYLKAKLGKYYIFDDTPIAKALYRNWRECKFVEDEGDVVFYKH

SEQ ID NO: 299 - protein, 403 aa, Artificial sequence
  Delta-15 Desaturase
MAPPHVVDEQVRRRIVVEDEIKSKKQFERNYVPMDFTIKEIRDAIPAHLFIRDTTKSILHVVKDLVTIAIVFYCATFIETLPSLALRVPAWITYWIIQGTVMVGPWILAHECGHGAFSQSKSINNIFGWVLHSALLVPYQAWAMSHSKHHKGTGSMKKDLVFIPATRSYKGLPALEKPAVEEEVSEQEHHHHEESIFAETPIYTLGALLFVLTFGWPLYLIVNFSGHEAPHWVNHFQTVAPLYEPHQRKNIFYSNCGIVAMGSILTYLSMVFSPLTVFMYYGIPYLGVNAWIVCITYLQHTDPKVPHFRDNEWNFQRGAACTIDRSFGTIVNHLHHHIGDSHQCHHMFSQMPFYNAVEATKYLKAKLGKYYIFDDTPIAKALYRNWRECKFVEDEGDVVFYKH

SEQ ID NO: 300 - protein, 403 aa, Artificial sequence
  Delta-15 Desaturase
MAPPHVVDEQVRRRIVVEDEIKSKKQFERNYVPMDFTIKEIRDAIPAHLFIRDTTKSILHVVKDLVTIAIVFYCATFIETLPSLALRVPAWITYWIIQGTVMVGPWILAHECGHGAFSEHKTINSIMGWVLHSALLVPYQAWAMSHSKHHKGTGTMTKDVVFIPATRSYKGLPALEKPAVEEEVSEQEHHHHEESIFAETPIYTLGALLFVLTFGWPLYLIVNFSGHEAPHWVNHFQTVAPLYEPHQRKNIFYSNCGIVAMGSILTYLSMVFSPLTVFMYYGIPYLGVNAWIVCITYLQHTDPKVPHFRDNEWNFQRGAACTIDRSFGTIVNHLHHHIGDSHQCHHMFSQMPFYNAVEATKYLKAKLGKYYIFDDTPIAKALYRNWRECKFVEDEGDVVFYKH

SEQ ID NO: 301 - protein, 403 aa, Artificial sequence
  Delta-15 Desaturase
MAPPHVVDEQVRRRIVVEDEIKSKKQFERNYVPMDFTIKEIRDAIPAHLFIRDTTKSILHVVKDLVTIAIVFYCATFIETLPSLALRVPAWITYWIIQGTVMVGPWILAHECGHGAFSHPRWFNNIMGWVLHSALLVPYQAWAMSHSKHHKGTGSMAKDLVFIPATRSYKGLPALEKPAVEEEVSEQEHHHHEESIFAETPIYTLGALLFVLTFGWPLYLIVNFSGHEAPHWVNHFQTVAPLYEPHQRKNIFYSNCGIVAMGSILTYLSMVFSPLTVFMYYGIPYLGVNAWIVCITYLQHTDPKVPHFRDNEWNFQRGAACTIDRSFGTIVNHLHHHIGDSHQCHHMFSQMPFYNAVEATKYLKAKLGKYYIFDDTPIAKALYRNWRECKFVEDEGDVVFYKH

SEQ ID NO: 302 - protein, 403 aa, Artificial sequence
  Delta-15 Desaturase
MAPPHVVDEQVRRRIVVEDEIKSKKQFERNYVPMDFTIKEIRDAIPAHLFIRDTTKSILHVVKDLVTIAIVFYCATFIETLPSLALRVPAWITYWIIQGTVMVGPWILAHECGHGAFSKYKRFNYIFGWVLHSALLVPYQAWAMSHSKHHKGTGSMTKDFVFIPATRSYKGLPALEKPAVEEEVSEQEHHHHEESIFAETPIYTLGALLFVLTFGWPLYLIVNFSGHEAPHWVNHFQTVAPLYEPHQRKNIFYSNCGIVAMGSILTYLSMVFSPLTVFMYYGIPYLGVNAWIVCITYLQHTDPKVPHFRDNEWNFQRGAACTIDRSFGTIVNHLHHHIGDSHQCHHMFSQMPFYNAVEATKYLKAKLGKYYIFDDTPIAKALYRNWRECKFVEDEGDVVFYKH

SEQ ID NO: 303 - protein, 403 aa, Artificial sequence
  Delta-15 Desaturase
MAPPHVVDEQVRRRIVVEDEIKSKKQFERNYVPMDFTIKEIRDAIPAHLFIRDTTKSILHVVKDLVTIAIVFYCATFIETLPSLALRVPAWITYWIIQGTVMVGPWILAHECGHGAFSEHTTINSIIGWVLHSALLVPYQAWAMSHSKHHKGTGSMSKDFVFIPATRSYKGLPALEKPAVEEEVSEQEHHHHEESIFAETPIYTLGALLFVLTFGWPLYLIVNFSGHEAPHWVNHFQTVAPLYEPHQRKNIFYSNCGIVAMGSILTYLSMVFSPLTVFMYYGIPYLGVNAWIVCITYLQHTDPKVPHFRDNEWNFQRGAACTIDRSFGTIVNHLHHHIGDSHQCHHMFSQMPFYNAVEATKYLKAKLGKYYIFDDTPIAKALYRNWRECKFVEDEGDVVFYKH

SEQ ID NO: 304 - protein, 403 aa, Artificial sequence
  Delta-15 Desaturase
MAPPHVVDEQVRRRIVVEDEIKSKKQFERNYVPMYFTIKEIRDAIPAHLFIRDTTKSILHVVKDLVTIAIVFYCATFIETLPSLALRVPAWITYWIIQGTVMVGPWILAHECGHGAFSQSTWINTILGWVLHSALLVPYQAWAMSHSKHHKDTGHMTKDVVFIPATRSYKGLPALEKPAVEEEVSEQEHHHHEESIFAETPIYTLGALLFVLTFGWPLYLIVNFSGHEAPHWVNHFQTVAPLYEPHQRKNIFYSNCGIVAMGSILTYLSMVFSPLTVFMYYGIPYLGVNAWIVCITYLQHTDPKVPHFRDNEWNFQRGAACTIDRSFGTIVNHLHHHIGDSHQCHHMFSQMPFYNAVEATKYLKAKLGKYYIFDDTPIAKALYRNWRECKFVEDEGDVVFYKH

SEQ ID NO: 305 - protein, 403 aa, Artificial sequence
  Delta-15 Desaturase
MAPPHVVDEQVRRRIVVEDEIKSKKQFERNYVPMDFTIKEIRDAIPAHLFIRDTTKSILHVVKDLVTIAIVFYCATFIETLPSLALRVPAWITYWIIQGTVMVGPWILAHECGHGAFSKSKRFNSIFGWVLHSALLVPYQAWAMSHSKHHKFTGTMTKDVVFIPATRSYKGLPALEKPAVEEEVSEQEHHHHEESIFAETPIYTLGALLFVLTFGWPLYLIVNFSGHEAPHWVNHFQTVAPLYEPHQRKNIFYSNCGIVAMGSILTYLSMVFSPLTVFMYYGIPYLGVNAWIVCITYLQHTDPKVPHFRDNEWNFQRGAACTIDRSFGTIVNHLHHHIGDSHQCHHMFSQMPFYNAVEATKYLKAKLGKYYIFDDTPIAKALYRNWRECKFVEDEGDVVFYKH

SEQ ID NO: 306 - protein, 403 aa, Artificial sequence
  Delta-15 Desaturase
MAPPHVVDEQVRRRIVVEDEIKSKKQFERNYVPMDFTIKEIRDAIPAHLFIRDTTKSILHVVKDLVTIAIVFYCATFIETLPSLALRVPAWITYWIIQGTVMVGPWILAHECGHGAFSEYKTINNILGWVLHSALLVPYQAWAMSHSKHHKATGHMKKDLVFIPATRSYKGLPALEKPAVEEEVSEQEHHHHEESIFAETPIYTLGALLFVLTFGWPLYLIVNFSGHEAPHWVNHFQTVAPLYEPHQRKNIFYSNCGIVAMGSILTYLSMVFSPLTVFMYYGIPYLGVNAWIVCITYLQHTDPKVPHFRDNEWNFQRGAACTIDRSFGTIVNHLHHHIGDSHQCHHMFSQMPFYNAVEATKYLKAKLGKYYIFDDTPIAKALYRNWRECKFVEDEGDVVFYKH

SEQ ID NO: 307 - protein, 403 aa, Artificial sequence
  Delta-15 Desaturase
MAPPHVVDEQVRRRIVVEDEIKSKKQFERNYVPMDFTIKEIRDAIPAHLFIRDTTKSILHVVKDLVTIAIVFYCATFIETLPSLALRVPAWITYWIIQGTVMVGPWILAHECGHGAFSKYKTINSIFGWVLHSALLVPYQAWAMSHSKHHKFTGAMTKDVVFIPATRSYKGLPALEKPAVEEEVSEQEHHHHEESIFAETPIYTLGALLFVLTFGWPLYLIVNFSGHEAPHWVNHFQTVAPLYEPHQRKNIFYSNCGIVAMGSILTYLSMVFSPLTVFMYYGIPYLGVNAWIVCITYLQHTDPKVPHFRDNEWNFQRGAACTIDRSFGTIVNHLHHHIGDSHQCHHMFSQMPFYNAVEATKYLKAKLGKYYIFDDTPIAKALYRNWRECKFVEDEGDVVFYKH

SEQ ID NO: 308 - protein, 403 aa, Artificial sequence
  Delta-15 Desaturase
MAPPHVVDEQVRRRIVVEDEIKSKKQFERNYVPMDFTIKEIRDAIPAHLFIRDTTKSILHVVKDLVTIAIVFYCATFIETLPSLALRVPAWITYWIIQGTVMVGPWILAHECGHGAFSEYKTFNTIMGWVLHSALLVPYQAWAMSHSKHHKYTGAMTKDVVFIPATRSYKGLPALEKPAVEEEVSEQEHHHHEESIFAETPIYTLGALLFVLTFGWPLYLIVNFSGHEAPHWVNHFQTVAPLYEPHQRKNIFYSNCGIVAMGSILTYLSMVFSPLTVFMYYGIPYLGVNAWIVCITYLQHTDPKVPHFRDNEWNFQRGAACTIDRSFGTIVNHLHHHIGDSHQCHHMLSQMPFYNAVEATKYLKAKLGKYYIFDDTPIAKALYRNWRECKFVEDEGDVVFYKH

SEQ ID NO: 309 - protein, 403 aa, Artificial sequence
  Delta-15 Desaturase
MAPPHVVDEQVRRRIVVEDEIKSKKQFERNYVPMDFTIKEIRDAIPAHLFIRDTTKSILHVVKDLVTIAIVFYCATFIETLPSLALRVPAWITYWIIQGTVMVGPWILAHECGHGAFSKHKRFNTIIGWVLHSALLVPYQAWAMSHSKHHKFTGTMAKDVVFIPATRSYKGLPALEKPAVEEEVSEQEHHHHEESIFAETPIYTLGALLFVLTFGWPLYLIVNFSGHEAPHWVNHFQTVAPLYEPHQRKNIFYSNCGIVAMGSILTYLSMVFSPLTVFMYYGIPYLGVNAWIVCITYLQHTDPKVPHFRDNEWNFQRGAACTIDRSFGTIVNHLHHHIGDSHQCHHMFSQMPFYNAVEATKYLKAKLGKYYIFDDTPIAKALYRNWRECKFVEDEGDVVFYKH

SEQ ID NO: 310 - protein, 403 aa, Artificial sequence
  Delta-15 Desaturase
MAPPHVVDEQVRRRIVVEDEIKSKKQFERNYVPMDFTIKEIRDAIPAHLFIRDTTKSILHVVKDLVTIAIVFYCATFIETLPSLALRVPAWITYWIIQGTVMVGPWILAHECGHGAFSKHRSFNSILGWVLHSALLVPYQAWAMSHSKHHKFTGTMAKDVVFIPATRSYKGLPALEKPAVEEEVSEQEHHHHEESIFAETPIYTLGALLFVLTFGWPLYLIVNFSGHEAPHWVNHFQTVAPLYEPHQRKNIFYSNCGIVAMGSILTYLSMVFSPLTVFMYYGIPYLGVNAWIVCITYLQHTDPKVPHFRDNEWNFQRGAACTIDRSFGTIVNHLHHHIGDSHQCHHMFSQMPFYNAVEATKYLKAKLGKYYIFDDTPIAKALYRNWRECKFVEDEGDVVFYKH

SEQ ID NO: 311 - protein, 403 aa, Artificial sequence
  Delta-15 Desaturase
MAPPHVVDEQVRRRIVVEDEIKSKKQFERNYVPMDFTIKEIRDAIPAHLFIRDTTKSILHVVKDLVTIAIVFYCATFIETLPSLALRVPAWITYWIIQGTVMVGPWILAHECGHGAFSKYRRFNTILGWVLHSALLVPYQAWAMSHSKHHKFTGTMAKDVVFIPATRSYKGLPALEKPAVEEEVSEQEHHHHEESIFAETPIYTLGALLFVLTFGWPLYLIVNFSGHEAPHWVNHFQTVAPLYEPHQRKNIFYSNCGIVAMGSILTYLSMVFSPLTVFMYYGIPYLGVNAWIVCITYLQHTDPKVPHFRDNEWNFQRGAACTIDRSFGTIVNHLHHHIGDSHQCHHMFSQMPFYNAVEATKYLKAKLGKYYIFDDTPIAKALYRNWRECKFVEDEGDVVFYKH

SEQ ID NO: 312 - protein, 403 aa, Artificial sequence
  Delta-15 Desaturase
MAPPHVVDEQVRRRIVVEDEIKSKKQFERNYVPMDFTIKEIRDAIPAHLFIRDTTKSILHVVKDLVTIAIVFYCATFIETLPSLALRVPAWITYWIIQGTVMVGPWILAHECGHGAFSKSKSINTIMGWVLHSALLVPYQAWAMSHSKHHKFTGTMAKDVVFIPATRSYKGLPALEKPAVEEEVSEQEHHHHEESIFAETPIYTLGALLFVLTFGWPLYLIVNFSGHEAPHWVNHFQTVAPLYEPHQRKNIFYSNCGIVAMGSILTYLSMVFSPLTVFMYYGIPYLGVNAWIVCITYLQHTDPKVPHFRDNEWNFQRGAACTIDRSFGTIVNHLHHHIGDSHQCHHMFSQMPFYNAVEATKYLKAKLGKYYIFDDTPIAKALYRNWRECKFVEDEGDVVFYKH

SEQ ID NO: 313 - protein, 403 aa, Artificial sequence
  Delta-15 Desaturase
MAPPHVVDEQVRRRIVVEDEIKSKKQFERNYVPMDFTIKEIRDAIPAHLFIRDTTKSILHVVKDLVTIAIVFYCATFIETLPSLALRVPAWITYWIIQGTVMVGPWILAHECGHGAFSKSKSFNTILGWVLHSALLVPYQAWAMSHSKHHKFTGTMAKDVVFIPATRSYKGLPALEKPAVEEEVSEQEHHHHEESIFAETPIYTLGALLFVLTFGWPLYLIVNFSGHEAPHWVNHFQTVAPLYEPHQRKNIFYSNCGIVAMGSILTYLSMVFSPLTVFMYYGIPYLGVNAWIVCITYLQHTDPKVPHFRDNEWNFQRGAACTIDRSFGTIVNHLHHHIGDSHQCHHMFSQMPFYNAVEATKYLKAKLGKYYIFDDTPIAKALYRNWRECKFVEDEGDVVFYKH

SEQ ID NO: 314 - protein, 403 aa, Artificial sequence
  Delta-15 Desaturase
MAPPHVVDEQVRRRIVVEDEIKSKKQFERNYVPMDFTIKEIRDAIPAHLFIRDTTKSILHVVKDLVTIAIVFYCATFIETLPSLALRVPAWITYWIIQGTVMVGPWILAHECGHGAFSDSKTINTIFGWVLHSALLVPYQAWAMSHSKHHKGTGSMTKDVVFIPATSTDEDVPPLEKPAVEEEVSEQEHHHHEESIFAETPIYTLGALLFVLTFGWPLYLIVNFSGHEAPHWVNHFQTVAPLYEPHQRKNIFYSNCGIVAMGSILTYLSMVFSPLTVFMYYGIPYLGVNAWIVCITYLQHTDPKVPHFRDNEWNFQRGAACTIDRSFGTIVNHLHHHIGDSHQCHHMFSQMPFYNAVEATKYLKAKLGKYYIFDDTPIAKALYRNWRECKFVEDEGDVVFYKH

SEQ ID NO: 315 - protein, 403 aa, Artificial sequence
  Delta-15 Desaturase
MAPPHVVDEQVRRRIVVEDEIKSKKQFERNYVPMDFTIKEIRDAIPAHLFIRDTTKSILHVVKDLVTIAIVFYCATFIETLPSLALRVPAWITYWIIQGTVMVGPWILAHECGHGAFSDSKTINTIFGWVLHSALLVPYQAWAMSHSKHHKGTGSMTKDVVFIPATEGYKNIPDLEKPAVEEEVSEQEHHHHEESIFAETPIYTLGALLFVLTFGWPLYLIVNFSGHEAPHWVNHFQTVAPLYEPHQRKNIFYSNCGIVAMGSILTYLSMVFSPLTVFMYYGIPYLGVNAWIVCITYLQHTDPKVPHFRDNEWNFQRGAACTIDRSFGTIVNHLHHHIGDSHQCHHMFSQMPFYNAVEATKYLKAKLGKYYIFDDTPIAKALYRNWRECKFVEDEGDVVFYKH

SEQ ID NO: 316 - protein, 403 aa, Artificial sequence
  Delta-15 Desaturase
MAPPHVVDEQVRRRIVVEDEIKSKKQFERNYVPMDFTIKEIRDAIPAHLFIRDTTKSILHVVKDLVTIAIVFYCATFIETLPSLALRVPAWITYWIIQGTVMVGPWILAHECGHGAFSDSKTINTIFGWVLHSALLVPYQAWAMSHSKHHKGTGSMTKDVVFIPATGGYEGVPHLEKPAVEEEVSEQEHHHHEESIFAETPIYTLGALLFVLTFGWPLYLIVNFSGHEAPHWVNHFQTVAPLYEPHQRKNIFYSNCGIVAMGSILTYLSMVFSPLTVFMYYGIPYLGVNAWIVCITYLQHTDPKVPHFRDNEWNFQRGAACTIDRSFGTIVNHLHHHIGDSHQCHHMFSQMPFYNAVEATKYLKAKLGKYYIFDDTPIAKALYRNWRECKFVEDEGDVVFYKH

SEQ ID NO: 317 - protein, 403 aa, Artificial sequence
  Delta-15 Desaturase
MAPPHVVDEQVRRRIVVEDEIKSKKQFERNYVPMDFTIKEIRDAIPAHLFIRDTTKSILHVVKDLVTIAIVFYCATFIETLPSLALRVPAWITYWIIQGTVMVGPWILAHECGHGAFSDSKTINTIFGWVLHSALLVPYQAWAMSHSKHHKGTGSMTKDVVFIPATSWLRDVRDLEKPAVEEEVSEQEHHHHEESIFAETPIYTLGALLFVLTFGWPLYLIVNFSGHEAPHWVNHFQTVAPLYEPHQRKNIFYSNCGIVAMGSILTYLSMVFSPLTVFMYYGIPYLGVNAWIVCITYLQHTDPKVPHFRDNEWNFQRGAACTIDRSFGTIVNHLHHHIGDSHQCHHMFSQMPFYNAVEATKYLKAKLGKYYIFDDTPIAKALYRNWRECKFVEDEGDVVFYKH

SEQ ID NO: 318 - protein, 403 aa, Artificial sequence
  Delta-15 Desaturase
MAPPHVVDEQVRRRIVVEDEIKSKKQFERNYVPMDFTIKEIRDAIPAHLFIRDTTKSILHVVKDLVTIAIVFYCATFIETLPSLALRVPAWITYWIIQGTVMVGPWILAHECGHGAFSDSKTINTIFGWVLHSALLVPYQAWAMSHSKHHKGTGSMTKDVVFIPATDTFKSVRNLEKPAVEEEVSEQEHHHHEESIFAETPIYTLGALLFVLTFGWPLYLIVNFSGHEAPHWVNHFQTVAPLYEPHQRKNIFYSNCGIVAMGSILTYLSMVFSPLTVFMYYGIPYLGVNAWIVCITYLQHTDPKVPHFRDNEWNFQRGAACTIDRSFGTIVNHLHHHIGDSHQCHHMFSQMPFYNAVEATKYLKAKLGKYYIFDDTPIAKALYRNWRECKFVEDEGDVVFYKH

SEQ ID NO: 319 - protein, 403 aa, Artificial sequence
  Delta-15 Desaturase
MAPPHVVDEQVRRRIVVEDEIKSKKQFERNYVPMDFTIKEIRDAIPAHLFIRDTTKSILHVVKDLVTIAIVFYCATFIETLPSLALRVPAWITYWIIQGTVMVGPWILAHECGHGAFSDSKTINTIFGWVLHSALLVPYQAWAMSHSKHHKGTGSMTKDVVFIPATRSYKGLPARDKLYMDEEVSEQEHHHHEESIFAETPIYTLGALLFVLTFGWPLYLIVNFSGHEAPHWVNHFQTVAPLYEPHQRKNIFYSNCGIVAMGSILTYLSMVFSPLTVFMYYGIPYLGVNAWIVCITYLQHTDPKVPHFRDNEWNFQRGAACTIDRSFGTIVNHLHHHIGDSHQCHHMFSQMPFYNAVEATKYLKAKLGKYYIFDDTPIAKALYRNWRECKFVEDEGDVVFYKH

SEQ ID NO: 320 - protein, 403 aa, Artificial sequence
  Delta-15 Desaturase
MAPPHVVDEQVRRRIVVEDEIKSKKQFERNYVPMDFTIKEIRDAIPAHLFIRDTTKSILHVVKDLVTIAIVFYCATFIETLPSLALRVPAWITYWIIQGTVMVGPWILAHECGHGAFSQPRWFNTIMGWVLHSALLVPYQAWAMSHSKHHKGTGSMSKDVVFIPATRSYKGLPALEKPAVEEEVSEQEHHHHEESIFAETPIYTLGALLFVLTFGWPLYLIVNFSGHEAPHWVNHFQTVAPLYEPHQRKNIFYSNCGIVAMGSILTYLSMVFSPLTVFMYYGIPYLGVNAWIVCITYLQHTDPKVPHFRDNEWNFQRGAACTIDRSFGTIVNHLHHHIGDSHQCHHMFSQMPFYNAVEATKYLKAKLGKYYIFDDTPIAKALYRNWRECKFVEDEGDVVFYKH

SEQ ID NO: 321 - protein, 403 aa, Artificial sequence
  Delta-15 Desaturase
MAPPHVVDEQVRRRIVVEDEIKSKKQFERNYVPMDFTIKEIRDAIPAHLFIRDTTKSILHVVKDLVTIAIVFYCATFIETLPSLALRVPAWITYWIIQGTVMVGPWILAHECGHGAFSKPRWFNYILGWVLHSALLVPYQAWAMSHSKHHKGTGSMTKDVVFIPATRSYKGLPALEKPAVEEEVSEQEHHHHEESIFAETPIYTLGALLFVLTFGWPLYLIVNFSGHEAPHWVNHFQTVAPLYEPHQRKNIFYSNCGIVAMGSILTYLSMVFSPLTVFMYYGIPYLGVNAWIVCITYLQHTDPKVPHFRDNEWNFQRGAACTIDRSFGTIVNHLHHHIGDSHQCHHMFSQMPFYNAVEATKYLKAKLGKYYIFDDTPIAKALYRNWRECKFVEDEGDVVFYKH

SEQ ID NO: 322 - protein, 403 aa, Artificial sequence
  Delta-15 Desaturase
MAPPHVVDEQVRRRIVVEDEIKSKKQFERNYVPMDFTIKEIRDAIPAHLFIRDTTKSILHVVKDLVTIAIVFYCATFIETLPSLALRVPAWITYWIIQGTVMVGPWILAHECGHGAFSKYKWINTIFGWVLHSALLVPYQAWAMSHSKHHKATGSMAKDMVFIPATRSYKGLPALEKPAVEEEVSEQEHHHHEESIFAETPIYTLGALLFVLTFGWPLYLIVNFSGHEAPHWVNHFQTVAPLYEPHQRKNIFYSNCGIVAMGSILTYLSMVFSPLTVFMYYGIPYLGVNAWIVCITYLQHTDPKVPHFRDNEWNFQRGAACTIDRSFGTIVNHLHHHIGDSHQCHHMFSQMPFYNAVEATKYLKAKLGKYYIFDDTPIAKALYRNWRECKFVEDEGDVVFYKH

SEQ ID NO: 323 - protein, 403 aa, Artificial sequence
  Delta-15 Desaturase
MAPPHVVDEQVRRRIVVEDEIKSKKQFERNYVPMDFTIKEIRDAIPAHLFIRDTTKSILHVVKDLVTIAIVFYCATFIETLPSLALRVPAWITYWIIQGTVMVGPWILAHECGHGAFSDSTTFNSIFGWVLHSALLVPYQAWAMSHSKHHKGTGSMTKDVVFIPATRSYKGLPALEKPAVEEEVSEQEHHHHEESIFAETPIYTLGALLFVLTFGWPLYLIVNFSGHEAPHWVNHFQTVAPLYEPHQRKNIFYSNCGIVAMGSILTYLSMVFSPLTVFMYYGIPYLGVNAWIVCITYLQHTDPKVPHFRDNEWNFQRGAACTIDRSFGTIVNHLHHHIGDSHQCHHMFSQMPFYNAVEATKYLKAKLGKYYIFDDTPIAKALYRNWRECKFVEDEGDVVFYKH

SEQ ID NO: 324 - protein, 403 aa, Artificial sequence
  Delta-15 Desaturase
MAPPHVVDEQVRRRIVVEDEIKSKKQFERNYVPMDFTIKEIRDAIPAHLFIRDTTKSILHVVKDLVTIAIVFYCATFIETLPSLALRVPAWITYWIIQGTVMVGPWILAHECGHGAFSQHTTINSILGWVLHSALLVPYQAWAMSHSKHHKGTGSMTKDVVFIPATRSYKGLPALEKPAVEEEVSEQEHHHHEESIFAETPIYTLGALLFVLTFGWPLYLIVNFSGHEAPHWVNHFQTVAPLYEPHQRKNIFYSNCGIVAMGSILTYLSMVFSPLTVFMYYGIPYLGVNAWIVCITYLQHTDPKVPHFRDNEWNFQRGAACTIDRSFGTIVNHLHHHIGDSHQCHHMFSQMPFYNAVEATKYLKAKLGKYYIFDDTPIAKALYRNWRECKFVEDEGDVVFYKH

SEQ ID NO: 325 - protein, 403 aa, Artificial sequence
  Delta-15 Desaturase
MAPPHVVDEQVRRRIVVEDEIKSKKQFERNYVPMDFTIKEIRDAIPAHLFIRDTTKSILHVVKDLVTIAIVFYCATFIETLPSLALRVPAWITYWIIQGTVMVGPWILAHECGHGAFSKHTWFNTIIGWVLHSALLVPYQAWAMSHSKHHKATGHMAKDVVFIPATRSYKGLPALEKPAVEEEVSEQEHHHHEESIFAETPIYTLGALLFVLTFGWPLYLIVNFSGHEAPHWVNHFQTVAPLYEPHQRKNIFYSNCGIVAMGSILTYLSMVFSPLTVFMYYGIPYLGVNAWIVCITYLQHTDPKVPHFRDNEWNFQRGAACTIDRSFGTIVNHLHHHIGDSHQCHHMFSQMPFYNAVEATKYLKAKLGKYYIFDDTPIAKALYRNWRECKFVEDEGDVVFYKH

SEQ ID NO: 326 - protein, 403 aa, Artificial sequence
  Delta-15 Desaturase
MAPPHVVDEQVRRRIVVEDEIKSKKQFERNYVPMDFTIKEIRDAIPAHLFIRDTTKSILHVVKDLVTIAIVFYCATFIETLPSLALRVPAWITYWIIQGTVMVGPWILAHECGHGAFSHYKWFNTILGWVLHSALLVPYQAWAMSHSKHHKSTGNMKKDLVFIPATRSYKGLPALEKPAVEEEVSEQEHHHHEESIFAETPIYTLGALLFVLTFGWPLYLIVNFSGHEAPHWVNHFQTVAPLYEPHQRKNIFYSNCGIVAMGSILTYLSMVFSPLTVFMYYGIPYLGVNAWIVCITYLQHTDPKVPHFRDNEWNFQRGAACTIDRSFGTIVNHLHHHIGDSHQCHHMFSQMPFYNAVEATKYLKAKLGKYYIFDDTPIAKALYRNWRECKFVEDEGDVVFYKH

SEQ ID NO: 327 - protein, 403 aa, Artificial sequence
  Delta-15 Desaturase
MAPPHVVDEQVRRRIVVEDEIKSKKQFERNYVPMDFTIKEIRDAIPAHLFIRDTTKSILHVVKDLVTIAIVFYCATFIETLPSLALRVPAWITYWIIQGTVMVGPWILAHECGHGAFAKSTWFNSIFGWVLHSALLVPYQAWAMSHSKHHKDTGNMEKDVVFIPATRSYKGLPALEKPAVEEEVSEQEHHHHEESIFAETPIYTLGALLFVLTFGWPLYLIVNFSGHEAPHWVNHFQTVAPLYEPHQRKNIFYSNCGIVAMGSILTYLSMVFSPLTVFMYYGIPYLGVNAWIVCITYLQHTDPKVPHFRDNEWNFQRGAACTIDRSFGTIVNHLHHHIGDSHQCHHMFSQMPFYNAVEATKYLKAKLGKYYIFDDTPIAKALYRNWRECKFVEDEGDVVFYKH

SEQ ID NO: 328 - protein, 403 aa, Artificial sequence
  Delta-15 Desaturase
MAPPHVVDEQVRRRIVVEDEIKSKKQFERNYVPMDFTIKEIRDAIPAHLFIRDTTKSILHVVKDLVTIAIVFYCATFIETLPSLALRVPAWITYWIIQGTVMVGPWILAHECGHGAFSEYKTINSIIGWVLHSALLVPYQAWAMSHSKHHKGTGSMTKDVVFIPATRSYKGLPALEKPAVEEEVSEQEHHHHEESIFAETPIYTLGALLFVLTFGWPLYLIVNFSGHEAPHWVNHFQTVAPLYEPHQRKNIFYSNCGIVAMGSILTYLSMVFSPLTVFMYYGIPYLGVNAWIVCITYLQHTDPKVPHFRDNEWNFQRGAACTIDRSFGTIVNHLHHHIGDSHQCHHMFSQMPFYNAVEATKYLKAKLGKYYIFDDTPIAKALYRNWRECKFVEDEGDVVFYKH

SEQ ID NO: 329 - protein, 403 aa, Artificial sequence
  Delta-15 Desaturase
MAPPHVVDEQVRRRIVVEDEIKSKKQFERNYVPMDFTIKEIRDAIPAHLFIRDTTKSILHVVKDLVTIAIVFYCATFIETLPSLALRVPAWITYWIIQGTVMVGPWILAHECGHGAFSKPKWFNTILGWVLHSALLVPYQAWAMSHSKHHKGTGSMTKDVVFIPATRSYKGLPALEKPAVEEEVSEQEHHHHEESIFAETPIYTLGALLFVLTFGWPLYLIVNFSGHEAPHWVNHFQTVAPLYEPHQRKNIFYSNCGIVAMGSILTYLSMVFSPLTVFMYYGIPYLGVNAWIVCITYLQHTDPKVPHFRDNEWNFQRGAACTIDRSFGTIVNHLHHHIGDSHQCHHMFSQMPFYNAVEATKYLKAKLGKYYIFDDTPIAKALYRNWRECKFVEDEGDVVFYKH

SEQ ID NO: 330 - protein, 403 aa, Artificial sequence
  Delta-15 Desaturase
MAPPHVVDEQVRRRIVVEDEIKSKKQFERNYVPMDFTIKEIRDAIPAHLFIRDTTKSILHVVKDLVTIAIVFYCATFIETLPSLALRVPAWITYWIIQGTVMVGPWILAHECGHGAFSDSKTINTIFGWVLHSALLVPYQAWAMSHSKHHKGTGSMTKDVVFIPATRSYKGLPALEKPAVEEEVSEQEHHHHEESIFAETPIYILITFFFVLTFGWPLYLIVNFSGHEAPHWVNHFQTVAPLYEPHQRKNIFYSNCGIVAMGSILTYLSMVFSPLTVFMYYGIPYLGVNAWIVCITYLQHTDPKVPHFRDNEWNFQRGAACTIDRSFGTIVNHLHHHIGDSHQCHHMFSQMPFYNAVEATKYLKAKLGKYYIFDDTPIAKALYRNWRECKFVEDEGDVVFYKH

SEQ ID NO: 331 - protein, 403 aa, Artificial sequence
  Delta-15 Desaturase
MAPPHVVDEQVRRRIVVEDEIKSKKQFERNYVPMDFTIKEIRDAIPAHLFIRDTTKSILHVVKDLVTIAIVFYCATFIETLPSLALRVPAWITYWIIQGTVMVGPWILAHECGHGAFSDSKTINTIFGWVLHSALLVPYQAWAMSHSKHHKGTGSMTKDVVFIPATRSYKGLPALEKPAVEEEVSEQEHHHHEESIFAETPIYTLVTFIIVLTFGWPLYLIVNFSGHEAPHWVNHFQTVAPLYEPHQRKNIFYSNCGIVAMGSILTYLSMVFSPLTVFMYYGIPYLGVNAWIVCITYLQHTDPKVPHFRDNEWNFQRGAACTIDRSFGTIVNHLHHHIGDSHQCHHMFSQMPFYNAVEATKYLKAKLGKYYIFDDTPIAKALYRNWRECKFVEDEGDVVFYKH

SEQ ID NO: 332 - DNA, 1212 bp, Artificial sequence
  Delta-15 Desaturase
atggcccctccacacgtcgtcgacgaacaagttagaagaagaatcgttgttgaagacgagattaagtcaaagaaacaattcgagagaaactacgtcccaatggatttcactatcaaggaaatcagagacgctatccctgctcacttattcatcagagacacaactaagtcaattctacacgttgtcaaagatttggttaccattgccattgttttctactgtgctaccttcatcgaaactttgccatccttggctttgagagttccagcatggatcacctactggattattcaaggtaccgtcatggttggtccatggattttggctcacgaatgtggtcacggtgccttttctgattccaagactatcaacactattttcggttgggtcttgcattccgctttgttggttccttatcaggcatgggcaatgtcacactctaagcaccacaagtttactggtactatggcgaaggatgtcgtcttcattccagctactcgttcctacaaaggtctacctgccctagaaaagcctgctgttgaagaagaagtttctgaacaagaacatcaccaccatgaagaatccatctttgctgaaaccccaatctacactttgggtgccttgttgttcgttttaaccttcggttggccattgtacctaattgttaacttctctggtcacgaagccccacactgggtcaaccacttccaaactgttgctccattgtacgaaccacaccaaagaaagaacatcttttactctaactgtggtattgttgctatgggctctattttgacctatttgtccatggttttctctccattaactgttttcatgtactacggtatcccatacttgggtgttaatgcttggattgtttgcattacttacttacaacacactgatccaaaggttcctcacttcagagacaacgaatggaattttcaaagaggtgccgcttgtaccatcgatagatccttcggtactattgtcaaccacttgcaccaccacatcggcgattcccaccaatgtcaccacatgttctctcaaatgccattctacaatgctgtcgaagctactaagtatctaaaggccaagctaggtaagtactacatcttcgacgacactccaattgccaaggctttgtacagaaactggagagaatgtaaattcgtcgaagacgaaggtgatgttgttttctacaagcactaa

SEQ ID NO: 333 - DNA, 1212 bp, Artificial sequence
  Delta-15 Desaturase
atggcccctccacacgtcgtcgacgaacaagttagaagaagaatcgttgttgaagacgagattaagtcaaagaaacaattcgagagaaactacgtcccaatggatttcactatcaaggaaatcagagacgctatccctgctcacttattcatcagagacacaactaagtcaattctacacgttgtcaaagatttggttaccattgccattgttttctactgtgctaccttcatcgaaactttgccatccttggctttgagagttccagcatggatcacctactggattattcaaggtaccgtcatggttggtccatggattttggctcacgaatgtggtcacggtgccttttctgattccaagactatcaacactattttcggttgggtcttgcattccgctttgttggttccttatcaggcatgggcaatgtcacactctaagcaccacaagtctactggtactatgactaaggatgttgtcttcattccagctactcgttcctacaaaggtctacctgccctagaaaagcctgctgttgaagaagaagtttctgaacaagaacatcaccaccatgaagaatccatctttgctgaaaccccaatctacactttgggtgccttgttgttcgttttaaccttcggttggccattgtacctaattgttaacttctctggtcacgaagccccacactgggtcaaccacttccaaactgttgctccattgtacgaaccacaccaaagaaagaacatcttttactctaactgtggtattgttgctatgggctctattttgacctatttgtccatggttttctctccattaactgttttcatgtactacggtatcccatacttgggtgttaatgcttggattgtttgcattacttacttacaacacactgatccaaaggttcctcacttcagagacaacgaatggaattttcaaagaggtgccgcttgtaccatcgatagatccttcggtactattgtcaaccacttgcaccaccacatcggcgattcccaccaatgtcaccacatgttctctcaaatgccattctacaatgctgtcgaagctactaagtatctaaaggccaagctaggtaagtactacatcttcgacgacactccaattgccaaggctttgtacagaaactggagagaatgtaaattcgtcgaagacgaaggtgatgttgttttctacaagcactaa

SEQ ID NO: 334 - DNA, 1212 bp, Artificial sequence
  Delta-15 Desaturase
atggcccctccacacgtcgtcgacgaacaagttagaagaagaatcgttgttgaagacgagattaagtcaaagaaacaattcgagagaaactacgtcccaatggatttcactatcaaggaaatcagagacgctatccctgctcacttattcatcagagacacaactaagtcaattctacacgttgtcaaagatttggttaccattgccattgttttctactgtgctaccttcatcgaaactttgccatccttggctttgagagttccagcatggatcacctactggattattcaaggtaccgtcatggttggtccatggattttggctcacgaatgtggtcacggtgccttttctaaacccaagtggatcaactccattatcggttgggtcttgcattccgctttgttggttccttatcaggcatgggcaatgtcacactctaagcaccacaaggttactggttccatgactaaggatgttgtcttcattccagctactcgttcctacaaaggtctacctgccctagaaaagcctgctgttgaagaagaagtttctgaacaagaacatcaccaccatgaagaatccatctttgctgaaaccccaatctacactttgggtgccttgttgttcgttttaaccttcggttggccattgtacctaattgttaacttctctggtcacgaagccccacactgggtcaaccacttccaaactgttgctccattgtacgaaccacaccaaagaaagaacatcttttactctaactgtggtattgttgctatgggctctattttgacctatttgtccatggttttctctccattaactgttttcatgtactacggtatcccatacttgggtgttaatgcttggattgtttgcattacttacttacaacacactgatccaaaggttcctcacttcagagacaacgaatggaattttcaaagaggtgccgcttgtaccatcgatagatccttcggtactattgtcaaccacttgcaccaccacatcggcgattcccaccaatgtcaccacatgttctctcaaatgccattctacaatgctgtcgaagctactaagtatctaaaggccaagctaggtaagtactacatcttcgacgacactccaattgccaaggctttgtacagaaactggagagaatgtaaattcgtcgaagacgaaggtgatgttgttttctacaagcactaa

SEQ ID NO: 335 - DNA, 1212 bp, Artificial sequence
  Delta-15 Desaturase
atggcccctccacacgtcgtcgacgaacaagttagaagaagaatcgttgttgaagacgagattaagtcaaagaaacaattcgagagaaactacgtcccaatggatttcactatcaaggaaatcagagacgctatccctgctcacttattcatcagagacacaactaagtcaattctacacgttgtcaaagatttggttaccattgccattgttttctactgtgctaccttcatcgaaactttgccatccttggctttgagagttccagcatggatcacctactggattattcaaggtaccgtcatggttggtccatggattttggctcacgaatgtggtcacggtgccttttctaaacacaggaggttcaacaccattatcggttgggtcttgcattccgctttgttggttccttatcaggcatgggcaatgtcacactctaagcaccacaaggttactggtcatatgtcgaaggatttggtcttcattccagctactcgttcctacaaaggtctacctgccctagaaaagcctgctgttgaagaagaagtttctgaacaagaacatcaccaccatgaagaatccatctttgctgaaaccccaatctacactttgggtgccttgttgttcgttttaaccttcggttggccattgtacctaattgttaacttctctggtcacgaagccccacactgggtcaaccacttccaaactgttgctccattgtacgaaccacaccaaagaaagaacatcttttactctaactgtggtattgttgctatgggctctattttgacctatttgtccatggttttctctccattaactgttttcatgtactacggtatcccatacttgggtgttaatgcttggattgtttgcattacttacttacaacacactgatccaaaggttcctcacttcagagacaacgaatggaattttcaaagaggtgccgcttgtaccatcgatagatccttcggtactattgtcaaccacttgcaccaccacatcggcgattcccaccaatgtcaccacatgttctctcaaatgccattctacaatgctgtcgaagctactaagtatctaaaggccaagctaggtaagtactacatcttcgacgacactccaattgccaaggctttgtacagaaactggagagaatgtaaattcgtcgaagacgaaggtgatgttgttttctacaagcactaa

SEQ ID NO: 336 - DNA, 1212 bp, Artificial sequence
  Delta-15 Desaturase
atggcccctccacacgtcgtcgacgaacaagttagaagaagaatcgttgttgaagacgagattaagtcaaagaaacaattcgagagaaactacgtcccaatggatttcactatcaaggaaatcagagacgctatccctgctcacttattcatcagagacacaactaagtcaattctacacgttgtcaaagatttggttaccattgccattgttttctactgtgctaccttcatcgaaactttgccatccttggctttgagagttccagcatggatcacctactggattattcaaggtaccgtcatggttggtccatggattttggctcacgaatgtggtcacggtgccttttctcattacaggaggttcaacaccattttgggttgggtcttgcattccgctttgttggttccttatcaggcatgggcaatgtcacactctaagcaccacaagtgtactggtcgtatgacgaaggatgtggtcttcattccagctactcgttcctacaaaggtctacctgccctagaaaagcctgctgttgaagaagaagtttctgaacaagaacatcaccaccatgaagaatccatctttgctgaaaccccaatctacactttgggtgccttgttgttcgttttaaccttcggttggccattgtacctaattgttaacttctctggtcacgaagccccacactgggtcaaccacttccaaactgttgctccattgtacgaaccacaccaaagaaagaacatcttttactctaactgtggtattgttgctatgggctctattttgacctatttgtccatggttttctctccattaactgttttcatgtactacggtatcccatacttgggtgttaatgcttggattgtttgcattacttacttacaacacactgatccaaaggttcctcacttcagagacaacgaatggaattttcaaagaggtgccgcttgtaccatcgatagatccttcggtactattgtcaaccacttgcaccaccacatcggcgattcccaccaatgtcaccacatgttctctcaaatgccattctacaatgctgtcgaagctactaagtatctaaaggccaagctaggtaagtactacatcttcgacgacactccaattgccaaggctttgtacagaaactggagagaatgtaaattcgtcgaagacgaaggtgatgttgttttctacaagcactaa

SEQ ID NO: 337 - DNA, 1212 bp, Artificial sequence
  Delta-15 Desaturase
atggcccctccacacgtcgtcgacgaacaagttagaagaagaatcgttgttgaagacgagattaagtcaaagaaacaattcgagagaaactacgtcccaatggatttcactatcaaggaaatcagagacgctatccctgctcacttattcatcagagacacaactaagtcaattctacacgttgtcaaagatttggttaccattgccattgttttctactgtgctaccttcatcgaaactttgccatccttggctttgagagttccagcatggatcacctactggattattcaaggtaccgtcatggttggtccatggattttggctcacgaatgtggtcacggtgccttttctcatcccaagtggatcaactacattttcggttgggtcttgcattccgctttgttggttccttatcaggcatgggcaatgtcacactctaagcaccacaagtgtactggttccatgactaaggatgttgtcttcattccagctactcgttcctacaaaggtctacctgccctagaaaagcctgctgttgaagaagaagtttctgaacaagaacatcaccaccatgaagaatccatctttgctgaaaccccaatctacactttgggtgccttgttgttcgttttaaccttcggttggccattgtacctaattgttaacttctctggtcacgaagccccacactgggtcaaccacttccaaactgttgctccattgtacgaaccacaccaaagaaagaacatcttttactctaactgtggtattgttgctatgggctctattttgacctatttgtccatggttttctctccattaactgttttcatgtactacggtatcccatacttgggtgttaatgcttggattgtttgcattacttacttacaacacactgatccaaaggttcctcacttcagagacaacgaatggaattttcaaagaggtgccgcttgtaccatcgatagatccttcggtactattgtcaaccacttgcaccaccacatcggcgattcccaccaatgtcaccacatgttctctcaaatgccattctacaatgctgtcgaagctactaagtatctaaaggccaagctaggtaagtactacatcttcgacgacactccaattgccaaggctttgtacagaaactggagagaatgtaaattcgtcgaagacgaaggtgatgttgttttctacaagcactaa

SEQ ID NO: 338 - DNA, 1212 bp, Artificial sequence
  Delta-15 Desaturase
atggcccctccacacgtcgtcgacgaacaagttagaagaagaatcgttgttgaagacgagattaagtcaaagaaacaattcgagagaaactacgtcccaatggatttcactatcaaggaaatcagagacgctatccctgctcacttattcatcagagacacaactaagtcaattctacacgttgtcaaagatttggttaccattgccattgttttctactgtgctaccttcatcgaaactttgccatccttggctttgagagttccagcatggatcacctactggattattcaaggtaccgtcatggttggtccatggattttggctcacgaatgtggtcacggtgccttttctaaacccagggcgttcaactccattatgggttgggtcttgcattccgctttgttggttccttatcaggcatgggcaatgtcacactctaagcaccacaagtttactggtagtatgtcgaaggatttggtcttcattccagctactcgttcctacaaaggtctacctgccctagaaaagcctgctgttgaagaagaagtttctgaacaagaacatcaccaccatgaagaatccatctttgctgaaaccccaatctacactttgggtgccttgttgttcgttttaaccttcggttggccattgtacctaattgttaacttctctggtcacgaagccccacactgggtcaaccacttccaaactgttgctccattgtacgaaccacaccaaagaaagaacatcttttactctaactgtggtattgttgctatgggctctattttgacctatttgtccatggttttctctccattaactgttttcatgtactacggtatcccatacttgggtgttaatgcttggattgtttgcattacttacttacaacacactgatccaaaggttcctcacttcagagacaacgaatggaattttcaaagaggtgccgcttgtaccatcgatagatccttcggtactattgtcaaccacttgcaccaccacatcggcgattcccaccaatgtcaccacatgttctctcaaatgccattctacaatgctgtcgaagctactaagtatctaaaggccaagctaggtaagtactacatcttcgacgacactccaattgccaaggctttgtacagaaactggagagaatgtaaattcgtcgaagacgaaggtgatgttgttttctacaagcactaa

SEQ ID NO: 339 - DNA, 1212 bp, Artificial sequence
  Delta-15 Desaturase
atggcccctccacacgtcgtcgacgaacaagttagaagaagaatcgttgttgaagacgagattaagtcaaagaaacaattcgagagaaactacgtcccaatggatttcactatcaaggaaatcagagacgctatccctgctcacttattcatcagagacacaactaagtcaattctacacgttgtcaaagatttggttaccattgccattgttttctactgtgctaccttcatcgaaactttgccatccttggctttgagagttccagcatggatcacctactggattattcaaggtaccgtcatggttggtccatggattttggctcacgaatgtggtcacggtgccttttctcaacccacgacgatcaactacattttgggttgggtcttgcattccgctttgttggttccttatcaggcatgggcaatgtcacactctaagcaccacaaggctactggtaatatgaagaaggatatcgtcttcattccagctactcgttcctacaaaggtctacctgccctagaaaagcctgctgttgaagaagaagtttctgaacaagaacatcaccaccatgaagaatccatctttgctgaaaccccaatctacactttgggtgccttgttgttcgttttaaccttcggttggccattgtacctaattgttaacttctctggtcacgaagccccacactgggtcaaccacttccaaactgttgctccattgtacgaaccacaccaaagaaagaacatcttttactctaactgtggtattgttgctatgggctctattttgacctatttgtccatggttttctctccattaactgttttcatgtactacggtatcccatacttgggtgttaatgcttggattgtttgcattacttacttacaacacactgatccaaaggttcctcacttcagagacaacgaatggaattttcaaagaggtgccgcttgtaccatcgatagatccttcggtactattgtcaaccacttgcaccaccacatcggcgattcccaccaatgtcaccacatgttctctcaaatgccattctacaatgctgtcgaagctactaagtatctaaaggccaagctaggtaagtactacatcttcgacgacactccaattgccaaggctttgtacagaaactggagagaatgtaaattcgtcgaagacgaaggtgatgttgttttctacaagcactaa

SEQ ID NO: 340 - DNA, 1212 bp, Artificial sequence
  Delta-15 Desaturase
atggcccctccacacgtcgtcgacgaacaagttagaagaagaatcgttgttgaagacgagattaagtcaaagaaacaattcgagagaaactacgtcccaatggatttcactatcaaggaaatcagagacgctatccctgctcacttattcatcagagacacaactaagtcaattctacacgttgtcaaagatttggttaccattgccattgttttctactgtgctaccttcatcgaaactttgccatccttggctttgagagttccagcatggatcacctactggattattcaaggtaccgtcatggttggtccatggattttggctcacgaatgtggtcacggtgccttttctaaacacaggacgatcaacaacattatgggttgggtcttgcattccgctttgttggttccttatcaggcatgggcaatgtcacactctaagcaccacaagtctactggtagtatgtcgaaggatctggtcttcattccagctactcgttcctacaaaggtctacctgccctagaaaagcctgctgttgaagaagaagtttctgaacaagaacatcaccaccatgaagaatccatctttgctgaaaccccaatctacactttgggtgccttgttgttcgttttaaccttcggttggccattgtacctaattgttaacttctctggtcacgaagccccacactgggtcaaccacttccaaactgttgctccattgtacgaaccacaccaaagaaagaacatcttttactctaactgtggtattgttgctatgggctctattttgacctatttgtccatggttttctctccattaactgttttcatgtactacggtatcccatacttgggtgttaatgcttggattgtttgcattacttacttacaacacactgatccaaaggttcctcacttcagagacaacgaatggaattttcaaagaggtgccgcttgtaccatcgatagatccttcggtactattgtcaaccacttgcaccaccacatcggcgattcccaccaatgtcaccacatgttctctcaaatgccattctacaatgctgtcgaagctactaagtatctaaaggccaagctaggtaagtactacatcttcgacgacactccaattgccaaggctttgtacagaaactggagagaatgtaaattcgtcgaagacgaaggtgatgttgttttctacaagcactaa

SEQ ID NO: 341 - DNA, 1212 bp, Artificial sequence
  Delta-15 Desaturase
atggcccctccacacgtcgtcgacgaacaagttagaagaagaatcgttgttgaagacgagattaagtcaaagaaacaattcgagagaaactacgtcccaatggatttcactatcaaggaaatcagagacgctatccctgctcacttattcatcagagacacaactaagtcaattctacacgttgtcaaagatttggttaccattgccattgttttctactgtgctaccttcatcgaaactttgccatccttggctttgagagttccagcatggatcacctactggattattcaaggtaccgtcatggttggtccatggattttggctcacgaatgtggtcacggtgccttttctaaccccaggtcgttcaactccattttcggttgggtcttgcattccgctttgttggttccttatcaggcatgggcaatgtcacactctaagcaccacaagtgtactggtcatatgtcgaaggatgtcgtcttcattccagctactcgttcctacaaaggtctacctgccctagaaaagcctgctgttgaagaagaagtttctgaacaagaacatcaccaccatgaagaatccatctttgctgaaaccccaatctacactttgggtgccttgttgttcgttttaaccttcggttggccattgtacctaattgttaacttctctggtcacgaagccccacactgggtcaaccacttccaaactgttgctccattgtacgaaccacaccaaagaaagaacatcttttactctaactgtggtattgttgctatgggctctattttgacctatttgtccatggttttctctccattaactgttttcatgtactacggtatcccatacttgggtgttaatgcttggattgtttgcattacttacttacaacacactgatccaaaggttcctcacttcagagacaacgaatggaattttcaaagaggtgccgcttgtaccatcgatagatccttcggtactattgtcaaccacttgcaccaccacatcggcgattcccaccaatgtcaccacatgttctctcaaatgccattctacaatgctgtcgaagctactaagtatctaaaggccaagctaggtaagtactacatcttcgacgacactccaattgccaaggctttgtacagaaactggagagaatgtaaattcgtcgaagacgaaggtgatgttgttttctacaagcactaa

SEQ ID NO: 342 - DNA, 1212 bp, Artificial sequence
  Delta-15 Desaturase
atggcccctccacacgtcgtcgacgaacaagttagaagaagaatcgttgttgaagacgagattaagtcaaagaaacaattcgagagaaactacgtcccaatggatttcactatcaaggaaatcagagacgctatccctgctcacttattcatcagagacacaactaagtcaattctacacgttgtcaaagatttggttaccattgccattgttttctactgtgctaccttcatcgaaactttgccatccttggctttgagagttccagcatggatcacctactggattattcaaggtaccgtcatggttggtccatggattttggctcacgaatgtggtcacggtgccttttctgatcccacgaggttcaactccattttcggttgggtcttgcattccgctttgttggttccttatcaggcatgggcaatgtcacactctaagcaccacaagggtactggttccatgactaaggatgtcgtcttcattccagctactcgttcctacaaaggtctacctgccctagaaaagcctgctgttgaagaagaagtttctgaacaagaacatcaccaccatgaagaatccatctttgctgaaaccccaatctacactttgggtgccttgttgttcgttttaaccttcggttggccattgtacctaattgttaacttctctggtcacgaagccccacactgggtcaaccacttccaaactgttgctccattgtacgaaccacaccaaagaaagaacatcttttactctaactgtggtattgttgctatgggctctattttgacctatttgtccatggttttctctccattaactgttttcatgtactacggtatcccatacttgggtgttaatgcttggattgtttgcattacttacttacaacacactgatccaaaggttcctcacttcagagacaacgaatggaattttcaaagaggtgccgcttgtaccatcgatagatccttcggtactattgtcaaccacttgcaccaccacatcggcgattcccaccaatgtcaccacatgttctctcaaatgccattctacaatgctgtcgaagctactaagtatctaaaggccaagctaggtaagtactacatcttcgacgacactccaattgccaaggctttgtacagaaactggagagaatgtaaattcgtcgaagacgaaggtgatgttgttttctacaagcactaa

SEQ ID NO: 343 - DNA, 1212 bp, Artificial sequence
  Delta-15 Desaturase
atggcccctccacacgtcgtcgacgaacaagttagaagaagaatcgttgttgaagacgagattaagtcaaagaaacaattcgagagaaactacgtcccaatggatttcactatcaaggaaatcagagacgctatccctgctcacttattcatcagagacacaactaagtcaattctacacgttgtcaaagatttggttaccattgccattgttttctactgtgctaccttcatcgaaactttgccatccttggctttgagagttccagcatggatcacctactggattattcaaggtaccgtcatggttggtccatggattttggctcacgaatgtggtcacggtgccttttctaatcacacgacgatcaacaacattatcggttgggtcttgcattccgctttgttggttccttatcaggcatgggcaatgtcacactctaagcaccacaagtttactggtcatatggcgaaggatctggtcttcattccagctactcgttcctacaaaggtctacctgccctagaaaagcctgctgttgaagaagaagtttctgaacaagaacatcaccaccatgaagaatccatctttgctgaaaccccaatctacactttgggtgccttgttgttcgttttaaccttcggttggccattgtacctaattgttaacttctctggtcacgaagccccacactgggtcaaccacttccaaactgttgctccattgtacgaaccacaccaaagaaagaacatcttttactctaactgtggtattgttgctatgggctctattttgacctatttgtccatggttttctctccattaactgttttcatgtactacggtatcccatacttgggtgttaatgcttggattgtttgcattacttacttacaacacactgatccaaaggttcctcacttcagagacaacgaatggaattttcaaagaggtgccgcttgtaccatcgatagatccttcggtactattgtcaaccacttgcaccaccacatcggcgattcccaccaatgtcaccacatgttctctcaaatgccattctacaatgctgtcgaagctactaagtatctaaaggccaagctaggtaagtactacatcttcgacgacactccaattgccaaggctttgtacagaaactggagagaatgtaaattcgtcgaagacgaaggtgatgttgttttctacaagcactaa

SEQ ID NO: 344 - DNA, 1212 bp, Artificial sequence
  Delta-15 Desaturase
atggcccctccacacgtcgtcgacgaacaagttagaagaagaatcgttgttgaagacgagattaagtcaaagaaacaattcgagagaaactacgtcccaatggatttcactatcaaggaaatcagagacgctatccctgctcacttattcatcagagacacaactaagtcaattctacacgttgtcaaagatttggttaccattgccattgttttctactgtgctaccttcatcgaaactttgccatccttggctttgagagttccagcatggatcacctactggattattcaaggtaccgtcatggttggtccatggattttggctcacgaatgtggtcacggtgccttttctaactacaagaggttcaacaccattatcggttgggtcttgcattccgctttgttggttccttatcaggcatgggcaatgtcacactctaagcaccacaagtctactggtcgtatgacgaaggatgtggtcttcattccagctactcgttcctacaaaggtctacctgccctagaaaagcctgctgttgaagaagaagtttctgaacaagaacatcaccaccatgaagaatccatctttgctgaaaccccaatctacactttgggtgccttgttgttcgttttaaccttcggttggccattgtacctaattgttaacttctctggtcacgaagccccacactgggtcaaccacttccaaactgttgctccattgtacgaaccacaccaaagaaagaacatcttttactctaactgtggtattgttgctatgggctctattttgacctatttgtccatggttttctctccattaactgttttcatgtactacggtatcccatacttgggtgttaatgcttggattgtttgcattacttacttacaacacactgatccaaaggttcctcacttcagagacaacgaatggaattttcaaagaggtgccgcttgtaccatcgatagatccttcggtactattgtcaaccacttgcaccaccacatcggcgattcccaccaatgtcaccacatgttctctcaaatgccattctacaatgctgtcgaagctactaagtatctaaaggccaagctaggtaagtactacatcttcgacgacactccaattgccaaggctttgtacagaaactggagagaatgtaaattcgtcgaagacgaaggtgatgttgttttctacaagcactaa

SEQ ID NO: 345 - DNA, 1212 bp, Artificial sequence
  Delta-15 Desaturase
atggcccctccacacgtcgtcgacgaacaagttagaagaagaatcgttgttgaagacgagattaagtcaaagaaacaattcgagagaaactacgtcccaatggatttcactatcaaggaaatcagagacgctatccctgctcacttattcatcagagacacaactaagtcaattctacacgttgtcaaagatttggttaccattgccattgttttctactgtgctaccttcatcgaaactttgccatccttggctttgagagttccagcatggatcacctactggattattcaaggtaccgtcatggttggtccatggattttggctcacgaatgtggtcacggtgccttttctaaccacaagtggttcaacaacattttcggttgggtcttgcattccgctttgttggttccttatcaggcatgggcaatgtcacactctaagcaccacaaggttactggtcatatggagaaggatatggtcttcattccagctactcgttcctacaaaggtctacctgccctagaaaagcctgctgttgaagaagaagtttctgaacaagaacatcaccaccatgaagaatccatctttgctgaaaccccaatctacactttgggtgccttgttgttcgttttaaccttcggttggccattgtacctaattgttaacttctctggtcacgaagccccacactgggtcaaccacttccaaactgttgctccattgtacgaaccacaccaaagaaagaacatcttttactctaactgtggtattgttgctatgggctctattttgacctatttgtccatggttttctctccattaactgttttcatgtactacggtatcccatacttgggtgttaatgcttggattgtttgcattacttacttacaacacactgatccaaaggttcctcacttcagagacaacgaatggaattttcaaagaggtgccgcttgtaccatcgatagatccttcggtactattgtcaaccacttgcaccaccacatcggcgattcccaccaatgtcaccacatgttctctcaaatgccattctacaatgctgtcgaagctactaagtatctaaaggccaagctaggtaagtactacatcttcgacgacactccaattgccaaggctttgtacagaaactggagagaatgtaaattcgtcgaagacgaaggtgatgttgttttctacaagcactaa

SEQ ID NO: 346 - DNA, 1212 bp, Artificial sequence
  Delta-15 Desaturase
atggcccctccacacgtcgtcgacgaacaagttagaagaagaatcgttgttgaagacgagattaagtcaaagaaacaattcgagagaaactacgtcccaatggatttcactatcaaggaaatcagagacgctatccctgctcacttattcatcagagacacaactaagtcaattctacacgttgtcaaagatttggttaccattgccattgttttctactgtgctaccttcatcgaaactttgccatccttggctttgagagttccagcatggatcacctactggattattcaaggtaccgtcatggttggtccatggattttggctcacgaatgtggtcacggtgccttttctgattccaagactatcaacactattttcggttgggtcttgcattccgctttgttggttccttatcaggcatgggcaatgtcacactctaagcaccacaagggtactggttccatgactaaggatgttgtcttcattccagctactcgttcctacaaaggtctacctgccctagaaaagcctgctgttgaagaagaagtttctgaacaagaacatcaccaccatgaagaatccatctttgctgaaaccccaatctacactttgagcacgttcatcgtcgtcctgaccttcggttggccattgtacctaattgttaacttctctggtcacgaagccccacactgggtcaaccacttccaaactgttgctccattgtacgaaccacaccaaagaaagaacatcttttactctaactgtggtattgttgctatgggctctattttgacctatttgtccatggttttctctccattaactgttttcatgtactacggtatcccatacttgggtgttaatgcttggattgtttgcattacttacttacaacacactgatccaaaggttcctcacttcagagacaacgaatggaattttcaaagaggtgccgcttgtaccatcgatagatccttcggtactattgtcaaccacttgcaccaccacatcggcgattcccaccaatgtcaccacatgttctctcaaatgccattctacaatgctgtcgaagctactaagtatctaaaggccaagctaggtaagtactacatcttcgacgacactccaattgccaaggctttgtacagaaactggagagaatgtaaattcgtcgaagacgaaggtgatgttgttttctacaagcactaa

SEQ ID NO: 347 - DNA, 1212 bp, Artificial sequence
  Delta-15 Desaturase
atggcccctccacacgtcgtcgacgaacaagttagaagaagaatcgttgttgaagacgagattaagtcaaagaaacaattcgagagaaactacgtcccaatggatttcactatcaaggaaatcagagacgctatccctgctcacttattcatcagagacacaactaagtcaattctacacgttgtcaaagatttggttaccattgccattgttttctactgtgctaccttcatcgaaactttgccatccttggctttgagagttccagcatggatcacctactggattattcaaggtaccgtcatggttggtccatggattttggctcacgaatgtggtcacggtgccttttctgattccaagactatcaacactattttcggttgggtcttgcattccgctttgttggttccttatcaggcatgggcaatgtcacactctaagcaccacaagggtactggttccatgactaaggatgttgtcttcattccagctactcgttcctacaaaggtctacctgccctagaaaagcctgctgttgaagaagaagtttctgaacaagaacatcaccaccatgaagaatccatctttgctgaaaccccaatctacagtttgagctcgttcatcgtcgtcctgaccttcggttggccattgtacctaattgttaacttctctggtcacgaagccccacactgggtcaaccacttccaaactgttgctccattgtacgaaccacaccaaagaaagaacatcttttactctaactgtggtattgttgctatgggctctattttgacctatttgtccatggttttctctccattaactgttttcatgtactacggtatcccatacttgggtgttaatgcttggattgtttgcattacttacttacaacacactgatccaaaggttcctcacttcagagacaacgaatggaattttcaaagaggtgccgcttgtaccatcgatagatccttcggtactattgtcaaccacttgcaccaccacatcggcgattcccaccaatgtcaccacatgttctctcaaatgccattctacaatgctgtcgaagctactaagtatctaaaggccaagctaggtaagtactacatcttcgacgacactccaattgccaaggctttgtacagaaactggagagaatgtaaattcgtcgaagacgaaggtgatgttgttttctacaagcactaa

SEQ ID NO: 348 - DNA, 1212 bp, Artificial sequence
  Delta-15 Desaturase
atggcccctccacacgtcgtcgacgaacaagttagaagaagaatcgttgttgaagacgagattaagtcaaagaaacaattcgagagaaactacgtcccaatggatttcactatcaaggaaatcagagacgctatccctgctcacttattcatcagagacacaactaagtcaattctacacgttgtcaaagatttggttaccattgccattgttttctactgtgctaccttcatcgaaactttgccatccttggctttgagagttccagcatggatcacctactggattattcaaggtaccgtcatggttggtccatggattttggctcacgaatgtggtcacggtgccttttctaaccacaagtcgttcaactccattttgggttgggtcttgcattccgctttgttggttccttatcaggcatgggcaatgtcacactctaagcaccacaagtttactggtactatggcgaaggatgtcgtcttcattccagctactcgttcctacaaaggtctacctgccctagaaaagcctgctgttgaagaagaagtttctgaacaagaacatcaccaccatgaagaatccatctttgctgaaaccccaatctacactttgggtgccttgttgttcgttttaaccttcggttggccattgtacctaattgttaacttctctggtcacgaagccccacactgggtcaaccacttccaaactgttgctccattgtacgaaccacaccaaagaaagaacatcttttactctaactgtggtattgttgctatgggctctattttgacctatttgtccatggttttctctccattaactgttttcatgtactacggtatcccatacttgggtgttaatgcttggattgtttgcattacttacttacaacacactgatccaaaggttcctcacttcagagacaacgaatggaattttcaaagaggtgccgcttgtaccatcgatagatccttcggtactattgtcaaccacttgcaccaccacatcggcgattcccaccaatgtcaccacatgttctctcaaatgccattctacaatgctgtcgaagctactaagtatctaaaggccaagctaggtaagtactacatcttcgacgacactccaattgccaaggctttgtacagaaactggagagaatgtaaattcgtcgaagacgaaggtgatgttgttttctacaagcactaa

SEQ ID NO: 349 - DNA, 1212 bp, Artificial sequence
  Delta-15 Desaturase
atggcccctccacacgtcgtcgacgaacaagttagaagaagaatcgttgttgaagacgagattaagtcaaagaaacaattcgagagaaactacgtcccaatggatttcactatcaaggaaatcagagacgctatccctgctcacttattcatcagagacacaactaagtcaattctacacgttgtcaaagatttggttaccattgccattgttttctactgtgctaccttcatcgaaactttgccatccttggctttgagagttccagcatggatcacctactggattattcaaggtaccgtcatggttggtccatggattttggctcacgaatgtggtcacggtgccttttctgatcacaggtggttcaacaccattatgggttgggtcttgcattccgctttgttggttccttatcaggcatgggcaatgtcacactctaagcaccacaagtttactggtactatgactaaggatgttgtcttcattccagctactcgttcctacaaaggtctacctgccctagaaaagcctgctgttgaagaagaagtttctgaacaagaacatcaccaccatgaagaatccatctttgctgaaaccccaatctacactttgggtgccttgttgttcgttttaaccttcggttggccattgtacctaattgttaacttctctggtcacgaagccccacactgggtcaaccacttccaaactgttgctccattgtacgaaccacaccaaagaaagaacatcttttactctaactgtggtattgttgctatgggctctattttgacctatttgtccatggttttctctccattaactgttttcatgtactacggtatcccatacttgggtgttaatgcttggattgtttgcattacttacttacaacacactgatccaaaggttcctcacttcagagacaacgaatggaattttcaaagaggtgccgcttgtaccatcgatagatccttcggtactattgtcaaccacttgcaccaccacatcggcgattcccaccaatgtcaccacatgttctctcaaatgccattctacaatgctgtcgaagctactaagtatctaaaggccaagctaggtaagtactacatcttcgacgacactccaattgccaaggctttgtacagaaactggagagaatgtaaattcgtcgaagacgaaggtgatgttgttttctacaagcactaa

SEQ ID NO: 350 - DNA, 1212 bp, Artificial sequence
  Delta-15 Desaturase
atggcccctccacacgtcgtcgacgaacaagttagaagaagaatcgttgttgaagacgagattaagtcaaagaaacaattcgagagaaactacgtcccaatggatttcactatcaaggaaatcagagacgctatccctgctcacttattcatcagagacacaactaagtcaattctacacgttgtcaaagatttggttaccattgccattgttttctactgtgctaccttcatcgaaactttgccatccttggctttgagagttccagcatggatcacctactggattattcaaggtaccgtcatggttggtccatggattttggctcacgaatgtggtcacggtgccttttctaattacaagtcgatcaacaacattatgggttgggtcttgcattccgctttgttggttccttatcaggcatgggcaatgtcacactctaagcaccacaaggctactggtagtatgacgaaggatttggtcttcattccagctactcgttcctacaaaggtctacctgccctagaaaagcctgctgttgaagaagaagtttctgaacaagaacatcaccaccatgaagaatccatctttgctgaaaccccaatctacactttgggtgccttgttgttcgttttaaccttcggttggccattgtacctaattgttaacttctctggtcacgaagccccacactgggtcaaccacttccaaactgttgctccattgtacgaaccacaccaaagaaagaacatcttttactctaactgtggtattgttgctatgggctctattttgacctatttgtccatggttttctctccattaactgttttcatgtactacggtatcccatacttgggtgttaatgcttggattgtttgcattacttacttacaacacactgatccaaaggttcctcacttcagagacaacgaatggaattttcaaagaggtgccgcttgtaccatcgatagatccttcggtactattgtcaaccacttgcaccaccacatcggcgattcccaccaatgtcaccacatgttctctcaaatgccattctacaatgctgtcgaagctactaagtatctaaaggccaagctaggtaagtactacatcttcgacgacactccaattgccaaggctttgtacagaaactggagagaatgtaaattcgtcgaagacgaaggtgatgttgttttctacaagcactaa

SEQ ID NO: 351 - DNA, 1212 bp, Artificial sequence
  Delta-15 Desaturase
atggcccctccacacgtcgtcgacgaacaagttagaagaagaatcgttgttgaagacgagattaagtcaaagaaacaattcgagagaaactacgtcccaatggatttcactatcaaggaaatcagagacgctatccctgctcacttattcatcagagacacaactaagtcaattctacacgttgtcaaagatttggttaccattgccattgttttctactgtgctaccttcatcgaaactttgccatccttggctttgagagttccagcatggatcacctactggattattcaaggtaccgtcatggttggtccatggattttggctcacgaatgtggtcacggtgccttttctaattccaggtcgatcaactacattatcggttgggtcttgcattccgctttgttggttccttatcagacatgggcaatgtcacactctaagcaccacaagtatactggtcatatgactaaggatgttgtcttcattccagctactcgttcctacaaaggtctacctgccctagaaaagcctgctgttgaagaagaagtttctgaacaagaacatcaccaccatgaagaatccatctttgctgaaaccccaatctacactttgggtgccttgttgttcgttttaaccttcggttggccattgtacctaattgttaacttctctggtcacgaagccccacactgggtcaaccacttccaaactgttgctccattgtacgaaccacaccaaagaaagaacatcttttactctaactgtggtattgttgctatgggctctattttgacctatttgtccatggttttctctccattaactgttttcatgtactacggtatcccatacttgggtgttaatgcttggattgtttgcattacttacttacaacacactgatccaaaggttcctcacttcagagacaacgaatggaattttcaaagaggtgccgcttgtaccatcgatagatccttcggtactattgtcaaccacttgcaccaccacatcggcgattcccaccaatgtcaccacatgttctctcaaatgccattctacaatgctgtcgaagctactaagtatctaaaggccaagctaggtaagtactacatcttcgacgacactccaattgccaaggctttgtacagaaactggagagaatgtaaattcgtcgaagacgaaggtgatgttgttttctacaagcactaa

SEQ ID NO: 352 - DNA, 1212 bp, Artificial sequence
  Delta-15 Desaturase
atggcccctccacacgtcgtcgacgaacaagttagaagaagaatcgttgttgaagacgagattaagtcaaagaaacaattcgagagaaactacgtcccaatggatttcactatcaaggaaatcagagacgctatccctgctcacttattcatcagagacacaactaagtcaattctacacgttgtcaaagatttggttaccattgccattgttttctactgtgctaccttcatcgaaactttgccatccttggctttgagagttccagcatggatcacctactggattattcaaggtaccgtcatggttggtccatggattttggctcacgaatgtggtcacggtgccttttctaaatacaagtggttcaactccattatcggttgggtcttgcattccgctttgttggttccttatcaggcatgggcaatgtcacactctaagcaccacaagtttactggtactatgactaaggatgttgtcttcattccagctactcgttcctacaaaggtctacctgccctagaaaagcctgctgttgaagaagaagtttctgaacaagaacatcaccaccatgaagaatccatctttgctgaaaccccaatctacactttgggtgccttgttgttcgttttaaccttcggttggccattgtacctaattgttaacttctctggtcacgaagccccacactgggtcaaccacttccaaactgttgctccattgtacgaaccacaccaaagaaagaacatcttttactctaactgtggtattgttgctatgggctctattttgacctatttgtccatggttttctctccattaactgttttcatgtactacggtatcccatacttgggtgttaatgcttggattgtttgcattacttacttacaacacactgatccaaaggttcctcacttcagagacaacgaatggaattttcaaagaggtgccgcttgtaccatcgatagatccttcggtactattgtcaaccacttgcaccaccacatcggcgattcccaccaatgtcaccacatgttctctcaaatgccattctacaatgctgtcgaagctactaagtatctaaaggccaagctaggtaagtactacatcttcgacgacactccaattgccaaggctttgtacagaaactggagagaatgtaaattcgtcgaagacgaaggtgatgttgttttctacaagcactaa

SEQ ID NO: 353 - DNA, 1212 bp, Artificial sequence
  Delta-15 Desaturase
atggcccctccacacgtcgtcgacgaacaagttagaagaagaatcgttgttgaagacgagattaagtcaaagaaacaattcgagagaaactacgtcccaatggatttcactatcaaggaaatcagagacgctatccctgctcacttattcatcagagacacaactaagtcaattctacacgttgtcaaagatttggttaccattgccattgttttctactgtgctaccttcatcgaaactttgccatccttggctttgagagttccagcatggatcacctactggattattcaaggtaccgtcatggttggtccatggattttggctcacgaatgtggtcacggtgccttttctaattacaagtggttcaactccattttgggttgggtcttgcattccgctttgttggttccttatcaggcatgggcaatgtcacactctaagcaccacaaggatactggtcatatgactaaggatgttgtcttcattccagctactcgttcctacaaaggtctacctgccctagaaaagcctgctgttgaagaagaagtttctgaacaagaacatcaccaccatgaagaatccatctttgctgaaaccccaatctacactttgggtgccttgttgttagttttaaccttcggttggccattgtacctaattgttaacttctctggtcacgaagccccacactgggtcaaccacttccaaactgttgctccattgtacgaaccacaccaaagaaagaacatcttttactctaactgtggtattgttgctatgggctctattttgacctatttgtccatggttttctctccattaactgttttcatgtactacggtatcccatacttgggtgttaatgcttggattgtttgcattacttacttacaacacactgatccaaaggttcctcacttcagagacaacgaatggaattttcaaagaggtgccgcttgtaccatcgatagatccttcggtactattgtcaaccacttgcaccaccacatcggcgattcccaccaatgtcaccacatgttctctcaaatgccattctacaatgctgtcgaagctactaagtatctaaaggccaagctaggtaagtactacatcttcgacgacactccaattgccaaggctttgtacagaaactggagagaatgtaaattcgtcgaagacgaaggtgatgttgttttctacaagcactaa

SEQ ID NO: 354 - DNA, 1212 bp, Artificial sequence
  Delta-15 Desaturase
atggcccctccacacgtcgtcgacgaacaagttagaagaagaatcgttgttgaagacgagattaagtcaaagaaacaattcgagagaaactacgtcccaatggatttcactatcaaggaaatcagagacgctatccctgctcacttattcatcagagacacaactaagtcaattctacacgttgtcaaagatttggttaccattgccattgttttctactgtgctaccttcatcgaaactttgccatccttggctttgagagttccagcatggatcacctactggattattcaaggtaccgtcatggttggtccatggattttggctcacgaatgtggtcacggtgccttttctaagcacaggtggttcaactccattttcggttgggtcttgcattccgctttgttggttccttatcaggcatgggcaatgtcacactctaagcaccacaaggctactggtactatgactaaggatgttgtcttcattccagctactcgttcctacaaaggtctacctgccctagaaaagcctgctgttgaagaagaagtttctgaacaagaacatcaccaccatgaagaatccatctttgctgaaaccccaatctacactttgggtgccttgttgttcgttttaaccttcggttggccattgtacctaattgttaacttctctggtcacgaagccccacactgggtcaaccacttccaaactgttgctccattgtacgaaccacaccaaagaaagaacatcttttactctaactgtggtattgttgctatgggctctattttgacctatttgtccatggttttctctccattaactgttttcatgtactacggtatcccatacttgggtgttaatgcttggattgtttgcattacttacttacaacacactgatccaaaggttcctcacttcagagacaacgaatggaattttcaaagaggtgccgcttgtaccatcgatagatccttcggtactattgtcaaccacttgcaccaccacatcggcgattcccaccaatgtcaccacatgttctctcaaatgccattctacaatgctgtcgaagctactaagtatctaaaggccaagctaggtaagtactacatcttcgacgacactccaattgccaaggctttgtacagaaactggagagaatgtaaattcgtcgaagacgaaggtgatgttgttttctacaagcactaa

SEQ ID NO: 355 - DNA, 1212 bp, Artificial sequence
  Delta-15 Desaturase
atggcccctccacacgtcgtcgacgaacaagttagaagaagaatcgttgttgaagacgagattaagtcaaagaaacaattcgagagaaactacgtcccaatggatttcactatcaaggaaatcagagacgctatccctgctcacttattcatcagagacacaactaagtcaattctacacgttgtcaaagatttggttaccattgccattgttttctactgtgctaccttcatcgaaactttgccatccttggctttgagagttccagcatggatcacctactggattattcaaggtaccgtcatggttggtccatggattttggctcacgaatgtggtcacggtgccttttctaatcacaggaggatcaactccattatcggttgggtcttgcattccgctttgttggttccttatcaggcatgggcaatgtcacactctaagcaccacaaggctactggtactatgactaaggatgttgtcttcattccagctactcgttcctacaaaggtctacctgccctagaaaagcctgctgttgaagaagaagtttctgaacaagaacatcaccaccatgaagaatccatctttgctgaaaccccaatctacactttgggtgccttgttgttcgttttaaccttcggttggccattgtacctaattgttaacttctctggtcacgaagccccacactgggtcaaccacttccaaactgttgctccattgtacgaaccacaccaaagaaagaacatcttttactctaactgtggtattgttgctatgggctctattttgacctatttgtccatggttttctctccattaactgttttcatgtactacggtatcccatacttgggtgttaatgcttggattgtttgcattacttacttacaacacactgatccaaaggttcctcacttcagagacaacgaatggaattttcaaagaggtgccgcttgtaccatcgatagatccttcggtactattgtcaaccacttgcaccaccacatcggcgattcccaccaatgtcaccacatgttctctcaaatgccattctacaatgctgtcgaagctactaagtatctaaaggccaagctaggtaagtactacatcttcgacgacactccaattgccaaggctttgtacagaaactggagagaatgtaaattcgtcgaagacgaaggtgatgttgttttctacaagcactaa

SEQ ID NO: 356 - DNA, 1212 bp, Artificial sequence
  Delta-15 Desaturase
atggcccctccacacgtcgtcgacgaacaagttagaagaagaatcgttgttgaagacgagattaagtcaaagaaacaattcgagagaaactacgtcccaatggatttcactatcaaggaaatcagagacgctatccctgctcacttattcatcagagacacaactaagtcaattctacacgttgtcaaagatttggttaccattgccattgttttctactgtgctaccttcatcgaaactttgccatccttggctttgagagttccagcatggatcacctactggattattcaaggtaccgtcatggttggtccatggattttggctcacgaatgtggtcacggtgccttttctaaccacaggaggttcaactccattatgggttgggtcttgcattccgctttgttggttccttatcaggcatgggcaatgtcacactctaagcaccacaaggctactggtactatgactaaggatgttgtcttcattccagctactcgttcctacaaaggtctacctgccctagaaaagcctgctgttgaagaagaagtttctgaacaagaacatcaccaccatgaagaatccatctttgctgaaaccccaatctacactttgggtgccttgttgttcgttttaaccttcggttggccattgtacctaattgttaacttctctggtcacgaagccccacactgggtcaaccacttccaaactgttgctccattgtacgaaccacaccaaagaaagaacatcttttactctaactgtggtattgttgctatgggctctattttgacctatttgtccatggttttctctccattaactgttttcatgtactacggtatcccatacttgggtgttaatgcttggattgtttgcattacttacttacaacacactgatccaaaggttcctcacttcagagacaacgaatggaattttcaaagaggtgccgcttgtaccatcgatagatccttcggtactattgtcaaccacttgcaccaccacatcggcgattcccaccaatgtcaccacatgttctctcaaatgccattctacaatgctgtcgaagctactaagtatctaaaggccaagctaggtaagtactacatcttcgacgacactccaattgccaaggctttgtacagaaactggagagaatgtaaattcgtcgaagacgaaggtgatgttgttttctacaagcactaa

SEQ ID NO: 357 - DNA, 1212 bp, Artificial sequence
  Delta-15 Desaturase
atggcccctccacacgtcgtcgacgaacaagttagaagaagaatcgttgttgaagacgagattaagtcaaagaaacaattcgagagaaactacgtcccaatggatttcactatcaaggaaatcagagacgctatccctgctcacttattcatcagagacacaactaagtcaattctacacgttgtcaaagatttggttaccattgccattgttttctactgtgctaccttcatcgaaactttgccatccttggctttgagagttccagcatggatcacctactggattattcaaggtaccgtcatggttggtccatggattttggctcacgaatgtggtcacggtgccttttctaaacccaagtcgatcaacaccattatgggttgggtcttgcattccgctttgttggttccttatcaggcatgggcaatgtcacactctaagcaccacaaggctactggtactatgactaaggatgttgtcttcattccagctactcgttcctacaaaggtctacctgccctagaaaagcctgctgttgaagaagaagtttctgaacaagaacatcaccaccatgaagaatccatctttgctgaaaccccaatctacactttgggtgccttgttgttcgttttaaccttcggttggccattgtacctaattgttaacttctctggtcacgaagccccacactgggtcaaccacttccaaactgttgctccattgtacgaaccacaccaaagaaagaacatcttttactctaactgtggtattgttgctatgggctctattttgacctatttgtccatggttttctctccattaactgttttcatgtactacggtatcccatacttgggtgttaatgcttggattgtttgcattacttacttacaacacactgatccaaaggttcctcacttcagagacaacgaatggaattttcaaagaggtgccgcttgtaccatcgatagatccttcggtactattgtcaaccacttgcaccaccacatcggcgattcccaccaatgtcaccacatgttctctcaaatgccattctacaatgctgtcgaagctactaagtatctaaaggccaagctaggtaagtactacatcttcgacgacactccaattgccaaggctttgtacagaaactggagagaatgtaaattcgtcgaagacgaaggtgatgttgttttctacaagcactaa

SEQ ID NO: 358 - DNA, 1212 bp, Artificial sequence
  Delta-15 Desaturase
atggcccctccacacgtcgtcgacgaacaagttagaagaagaatcgttgttgaagacgagattaagtcaaagaaacaattcgagagaaactacgtcccaatggatttcactatcaaggaaatcagagacgctatccctgctcacttattcatcagagacacaactaagtcaattctacacgttgtcaaagatttggttaccattgccattgttttctactgtgctaccttcatcgaaactttgccatccttggctttgagagttccagcatggatcacctactggattattcaaggtaccgtcatggttggtccatggattttggctcacgaatgtggtcacggtgccttttctaaacacaagtcgatcaacaccattttcggttgggtcttgcattccgctttgttggttccttatcaggcatgggcaatgtcacactctaagcaccacaaggctactggtactattactaaggatgttgtcttcattccagctactcgttcctacaaaggtctacctgccctagaaaagcctgctgttgaagaagaagtttctgaacaagaacatcaccaccatgaagaatccatctttgctgaaaccccaatctacactttgggtgccttgttgttcgttttaaccttcggttggccattgtacctaattgttaacttctctggtcacgaagccccacactgggtcaaccacttccaaactgttgctccattgtacgaaccacaccaaagaaagaacatcttttactctaactgtggtattgttgctatgggctctattttgacctatttgtccatggttttctctccattaactgttttcatgtactacggtatcccatacttgggtgttaatgcttggattgtttgcattacttacttacaacacactgatccaaaggttcctcacttcagagacaacgaatggaattttcaaagaggtgccgcttgtaccatcgatagatccttcggtactattgtcaaccacttgcaccaccacatcggcgattcccaccaatgtcaccacatgttctctcaaatgccattctacaatgctgtcgaagctactaagtatctaaaggccaagctaggtaagtactacatcttcgactacactccaattgccaaggctttgtacagaaactggagagaatgtaaattcgtcgaagacgaaggtgatgttgttttctacaagcactaa

SEQ ID NO: 359 - DNA, 1212 bp, Artificial sequence
  Delta-15 Desaturase
atggcccctccacacgtcgtcgacgaacaagttagaagaagaatcgttgttgaagacgagattaagtcaaagaaacaattcgagagaaactacgtcccaatggatttcactatcaaggaaatcagagacgctatccctgctcacttattcatcagagacacaactaagtcaattctacacgttgtaaaagatttggttaccattgccattgttttctactgtgctaccttcatcgaaactttgccatccttggctttgagagttccagcatggatcacctactggattattcaaggtaccgtcatggttggtccatggattttggctcacgaatgtggtcacggtgccttttctaaatccaagacgttcaactccattatgggttgggtcttgcattccgctttgttggttccttatcaggcatgggcaatgtcacactctaagcaccacaaggctactggtactatgactaaggatgttgtcttcattccagctactcgttcctacaaaggtctacctgccctagaaaagcctgctgttgaagaagaagtttctgaacaagaacatcaccaccatgaagaatccatctttgctgaaaccccaatctacactttgggtgccttgttgttcgttttaaccttcggttggccattgtacctaattgttaacttctctggtcacgaagccccacactgggtcaaccacttccaaactgttgctccattgtacgaaccacaccaaagaaagaacatcttttactctaactgtggtattgttgctatgggctctattttgacctatttgtccatggttttctctccattaactgttttcatgtactacggtatcccatacttgggtgttaatgcttggattgtttgcattacttacttacaacacactgatccaaaggttcctcacttcagagacaacgaatggaattttcaaagaggtgccgcttgtaccatcgatagatccttcggtactattgtcaaccacttgcaccaccacatcggcgattcccaccaatgtcaccacatgttctctcaaatgccattctacaatgctgtcgaagctactaagtatctaaaggccaagctaggtaagtactacatcttcgacgacactccaattgccaaggctttgtacagaaactggagagaatgtaaattcgtcgaagacgaaggtgatgttgttttctacaagcactaa

SEQ ID NO: 360 - DNA, 1212 bp, Artificial sequence
  Delta-15 Desaturase
atggcccctccacacgtcgtcgacgaacaagttagaagaagaatcgttgttgaagacgagattaagtcaaagaaacaattcgagagaaactacgtcccaatggatttcactatcaaggaaatcagagacgctatccctgctcacttattcatcagagacacaactaagtcaattctacacgttgtcaaagatttggttaccattgccattgttttctactgtgctaccttcatcgaaactttgccatccttggctttgagagttccagcatggatcacctactggattattcaaggtaccgtcatggttggtccatggattttggctcacgaatgtggtcacggtgccttttctcagtacaagaggttcaacaacattttgggttgggtcttgcattccgctttgttggttccttatcaggcatgggcaatgtcacactctaagcaccacaaggctactggtactatgactaaggatgttgtcttcattccagctactcgttcctacaaaggtctacctgccctagaaaagcctgctgttgaagaagaagtttctgaacaagaacatcaccaccatgaagaatccatctttgctgaaaccccaatctacactttgggtgccttgttgttcgttttaaccttcggttggccattgtacctaattgttaacttctctggtcacgaagccccacactgggtcaaccacttccaaactgttgctccattgtacgaaccacaccaaagaaagaacatcttttactctaactgtggtattgttgctatgggctctattttgacctatttgtccatggttttctctccattaactgttttcatgtactacggtatcccatacttgggtgttaatgcttggattgtttgcattacttacttacaacacactgatccaaaggttcctcacttcagagacaacgaatggaattttcaaagaggtgccgcttgtaccatcgatagatccttctgtactattgtcaaccacttgcaccaccacatcggcgattcccaccaatgtcaccacatgttctctcaaatgccattctacaatgctgtcgaagctactaagtatctaaaggccaagctaggtaagtactacatcttcgacgacactccaattgccaaggctttgtacagaaactggagagaatgtaaattcgtcgaagacgaaggtgatgttgttttctacaagcactaa

SEQ ID NO: 361 - DNA, 1212 bp, Artificial sequence
  Delta-15 Desaturase
atggcccctccacacgtcgtcgacgaacaagttagaagaagaatcgttgttgaagacgagattaagtcaaagaaacaattcgagagaaactacgtcccaatggatttcactatcaaggaaatcagagacgctatccctgctcacttattcatcagagacacaactaagtcaattctacacgttgtcaaagatttggttaccattgccattgttttctactgtgctaccttcatcgaaactttgccatccttggctttgagagttccagcatggatcacctactggattattcaaggtaccgtcatggttggtccatggattttggctcacgaatgtggtcacggtgccttttctcatcccaagtcgatcaacaccattatcggttgggtcttgcattccgctttgttggttccttatcaggcatgggcaatgtcacactctaagcaccacaaggctactggtactatgactaaggatgttgtcttcattccagctactcgttcctacaaaggtctacctgccctagaaaagcctgctgttgaagaagaagtttctgaacaagaacatcaccaccatgaagaatccatctttgctgaaaccccaatctacactttgggtgccttgttgttcgttttaaccttcggttggccattgtacctaattgttaacttctctggtcacgaagccccacactgggtcaaccacttccaaactgttgctccattgtacgaaccacaccaaagaaagaacatcttttactctaactgtggtattgttgctatgggctctattttgacctatttgtccatggttttctctccattaactgttttcatgtactacggtatcccatacttgggtgttaatgcttggattgtttgcattacttacttacaacacactgatccaaaggttcctcacttcagagacaacgaatggaattttcaaagaggtgccgcttgtaccatcgatagatccttcggtactattgtcaaccacttgcaccaccacatcggcgattcccaccaatgtcaccacatgttctctcaaatgccattctacaatgctgtcgaagctactaagtatctaaaggccaagctaggtaagtactacatcttcgacgacactccaattgccaaggctttgtacagaaactggagagaatgtaaattcgtcgaagacgaaggtgatgttgttttctacaagcactaa

SEQ ID NO: 362 - DNA, 1212 bp, Artificial sequence
  Delta-15 Desaturase
atggcccctccacacgtcgtcgacgaacaagttagaagaagaatcgttgttgaagacgagattaagtcaaagaaacaattcgagagaaactacgtcccaatggatttcactatcaaggaaatcagagacgctatccctgctcacttattcatcagagacacaactaagtcaattctacacgttgtcaaagatttggttaccattgccattgttttctactgtgctaccttcatcgaaactttgccatccttggctttgagagttccagcatggatcacctactggattattcaaggtaccgtcatggttggtccatggattttggctcacgaatgtggtcacggtgccttttctgaatccaagacgttcaacaccattatcggttgggtcttgcattccgctttgttggttccttatcaggcatgggcaatgtcacactctaagcaccacaaggctacttgtactatgactaaggatgttgtcttcattccagctactcgttcctacaaaggtctacctgccctagaaaagcctgctgttgaagaagaagtttctgaacaagaacatcaccaccatgaagaatccatctttgctgaaaccccaatctacactttgggtgccttgttgttcgttttaaccttcggttggccattgtacctaattgttaacttctctggtcacgaagccccacactgggtcaaccacttccaaactgttgctccattgtacgaaccacaccaaagaaagaacatcttttactctaactgtggtattgttgctatgggctctattttgacctatttgtccatggttttctctccattaactgttttcatgtactacggtatcccatacttgggtgttaatgcttggattgtttgcattacttacttacaacacactgatccaaaggttcctcacttcagagacaacgaatggaattttcaaagaggtgccgcttgtaccatcgatagatccttcggtactattgtcaaccacttgcaccaccacatcggcgattcccaccaatgtcaccacatgttctctcaaatgccattctacaatgctgtcgaagctactaagtatctaaaggccaagctaggtaagtactacatcttcgacgacactccaattgccaaggctttgtacagaaactggagagaatgtaaattcgtcgaagacgaaggtgatgttgttttctacaagcactaa

SEQ ID NO: 363 - DNA, 1212 bp, Artificial sequence
  Delta-15 Desaturase
atggcccctccacacgtcgtcgacgaacaagttagaagaagaatcgttgttgaagacgagattaagtcaaagaaacaattcgagagaaactacgtcccaatggatttcactatcaaggaaatcagagacgctatccctgctcacttattcatcagagacacaactaagtcaattctacacgttgtcaaagatttggttaccattgccattgttttctactgtgctaccttcatcgaaactttgccatccttggctttgagagttccagcatggatcacctactggattattcaaggtaccgtcatggttggtccatggattttggctcacgaatgtggtcacggtgccttttctcaacccaggtggttcaacaccattttgggttgggtcttgcattccgctttgttggttccttatcaggcatgggcaatgtcacactctaagcaccacaagtttactggtactatggcgaaggatgtcgtcttcattccagctactcgttcctacaaaggtctacctgccctagaaaagcctgctgttgaagaagaagtttctgaacaagaacatcaccaccatgaagaatccatctttgctgaaaccccaatctacactttgggtgccttgttgttcgttttaaccttcggttggccattgtacctaattgttaacttctctggtcacgaagccccacactgggtcaaccacttccaaactgttgctccattgtacgaaccacaccaaagaaagaacatcttttactctaactgtggtattgttgctatgggctctattttgacctatttgtccatggttttctctccattaactgttttcatgtactacggtatcccatacttgggtgttaatgcttggattgtttgcattacttacttacaacacactgatccaaaggttcctcacttcagagacaacgaatggaattttcaaagaggtgccgcttgtaccatcgatagatccttcggtactattgtcaaccacttgcaccaccacatcggcgattcccaccaatgtcaccacatgttctctcaaatgccattctacaatgctgtcgaagctactaagtatctaaaggccaagctaggtaagtactacatcttcgacgacactccaattgccaaggctttgtacagaaactggagagaatgtaaattcgtcgaagacgaaggtgatgttgttttctacaagcactaa

SEQ ID NO: 364 - DNA, 1212 bp, Artificial sequence
  Delta-15 Desaturase
atggcccctccacacgtcgtcgacgaacaagttagaagaagaatcgttgttgaagacgagattaagtcaaagaaacaattcgagagaaactacgtcccaatggatttcactatcaaggaaatcagagacgctatccctgctcacttattcatcagagacacaactaagtcaattctacacgttgtcaaagatttggttaccattgccattgttttctactgtgctaccttcatcgaaactttgccatccttggctttgagagttccagcatggatcacctactggattattcaaggtaccgtcatggttggtccatggattttggctcacgaatgtggtcacggtgccttttctcaatccaagacgatcaacaccattttcggttgggtcttgcattccgctttgttggttccttatcaggcatgggcaatgtcacactctaagcaccacaagtttactggtactatggcgaaggatgtcgtcttcattccagctactcgttcctacaaaggtctacctgccctagaaaagcctgctgttgaagaagaagtttctgaacaagaacatcaccaccatgaagaatccatctttgctgaaaccccaatctacactttgggtgccttgttgttcgttttaaccttcggttggccattgtacctaattgttaacttctctggtcacgaagccccacactgggtcaaccacttccaaactgttgctccattgtacgaaccacaccaaagaaagaacatcttttactctaactgtggtattgttgctatgggctctattttgacctatttgtccatggttttctctccattaactgttttcatgtactacggtatcccatacttgggtgttaatgcttggattgtttgcattacttacttacaacacactgatccaaaggttcctcacttcagagacaacgaatggaattttcaaagaggtgccgcttgtaccatcgatagatccttcggtactattgtcaaccacttgcaccaccacatcggcgattcccaccaatgtcaccacatgttctctcaaatgccattctacaatgctgtcgaagctactaagtatctaaaggccaagctaggtaagtactacatcttcgacgacactccaattgccaaggctttgtacagaaactggagagaatgtaaattcgtcgaagacgaaggtgatgttgttttctacaagcactaa

SEQ ID NO: 365 - DNA, 1212 bp, Artificial sequence
  Delta-15 Desaturase
atggcccctccacacgtcgtcgacgaacaagttagaagaagaatcgttgttgaagacgagattaagtcaaagaaacaattcgagagaaactacgtcccaatggatttcactatcaaggaaatcagagacgctatccctgctcacttattcatcagagacacaactaagtcaattctacacgttgtcaaagatttggttaccattgccattgttttctactgtgctaccttcatcgaaactttgccatccttggctttgagagttccagcatggatcacctactggattattcaaggtaccgtcatggttggtccatggattttggctcacgaatgtggtcacggtgccttttctaaatacaagtcgatcaacaacattttgggttgggtcttgcattccgctttgttggttccttatcaggcatgggcaatgtcacactctaagcaccacaagtttactggtactatggcgaaggatgtcgtcttcattccagctactcgttcctacaaaggtctacctgccctagaaaagcctgctgttgaagaagaagtttctgaacaagaacatcaccaccatgaagaatccatctttgctgaaaccccaatctacactttgggtgccttgttgttcgttttaaccttcggttggccattgtacctaattgttaacttctctggtcacgaagccccacactgggtcaaccacttccaaactgttgctccattgtacgaaccacaccaaagaaagaacatcttttactctaactgtggtattgttgctatgggctctattttgacctatttgtccatggttttctctccattaactgttttcatgtactacggtatcccatacttgggtgttaatgcttggattgtttgcattacttacttacaacacactgatccaaaggttcctcacttcagagacaacgaatggaattttcaaagaggtgccgcttgtaccatcgatagatccttcggtactattgtcaaccacttgcaccaccacatcggcgattcccaccaatgtcaccacatgttctctcaaatgccattctacaatgctgtcgaagctactaagtatctaaaggccaagctaggtaagtactacatcttcgacgacactccaattgccaaggctttgtacagaaactggagagaatgtaaattcgtcgaagacgaaggtgatgttgttttctacaagcactaa

SEQ ID NO: 366 - DNA, 1212 bp, Artificial sequence
  Delta-15 Desaturase
atggcccctccacacgtcgtcgacgaacaagttagaagaagaatcgttgttgaagacgagattaagtcaaagaaacaattcgagagaaactacgtcccaatggatttcactatcaaggaaatcagagacgctatccctgctcacttattcatcagagacacaactaagtcaattctacacgttgtcaaagatttggttaccattgccattgttttctactgtgctaccttcatcgaaactttgccatccttggctttgagagttccagcatggatcacctactggattattcaaggtaccgtcatggttggtccatggattttggctcacgaatgtggtcacggtgccttttctaaatacaagtcgatcaacaccattatgggttgggtcttgcattccgctttgttggttccttatcaggcatgggcaatgtcacactctaagcaccacaagtttactggtactatggcgaaggatgtcgtcttcattccagctactcgttcctacaaaggtctacctgccctagaaaagcctgctgttgaagaagaagtttctgaacaagaacatcaccaccatgaagaatccatctttgctgaaaccccaatctacactttgggtgccttgttgttcgttttaaccttcggttggccattgtacctaattgttaacttctctggtcacgaagccccacactgggtcaaccacttccaaactgttgctccattgtacgaaccacaccaaagaaagaacatcttttactctaactgtggtattgttgctatgggctctattttgacctatttgtccatggttttctctccattaactgttttcatgtactacggtatcccatacttgggtgttaatgcttggattgtttgcattacttacttacaacacactgatccaaaggttcctcacttcagagacaacgaatggaattttcaaagaggtgccgcttgtaccatcgatagatccttcggtactattgtcaaccacttgcaccaccacatcggcgattcccaccaatgtcaccacatgttctctcaaatgccattctacaatgctgtcgaagctactaagtatctaaaggccaagctaggtaagtactacatcttcgacgacactccaattgccaaggctttgtacagaaactggagagaatgtaaattcgtcgaagacgaaggtgatgttgttttctacaagcactaa

SEQ ID NO: 367 - DNA, 1212 bp, Artificial sequence
  Delta-15 Desaturase
atggcccctccacacgtcgtcgacgaacaagttagaagaagaatcgttgttgaagacgagattaagtcaaagaaacaattcgagagaaactacgtcccaatggatttcactatcaaggaaatcagagacgctatccctgctcacttattcatcagagacacaactaagtcaattctacacgttgtcaaagatttggttaccattgccattgttttctactgtgctaccttcatcgaaactttgccatccttggctttgagagttccagcatggatcacctactggattattcaaggtaccgtcatggttggtccatggattttggctcacgaatgtggtcacggtgccttttctgagtccaggacgttcaacaccattttgggttgggtcttgcattccgctttgttggttccttatcaggcatgggcaatgtcacactctaagcaccacaagtttactggtactatggcgaaggatgtcgtcttcattccagctactcgttcctacaaaggtctacctgccctagaaaagcctgctgttgaagaagaagtttctgaacaagaacatcaccaccatgaagaatccatctttgctgaaaccccaatctacactttgggtgccttgttgttcgttttaaccttcggttggccattgtacctaattgttaacttctctggtcacgaagccccacactgggtcaaccacttccaaactgttgctccattgtacgaaccacaccaaagaaagaacatcttttactctaactgtggtattgttgctatgggctctattttgacctatttgtccatggttttctctccattaactgttttcatgtactacggtatcccatacttgggtgttaatgcttggattgtttgcattacttacttacaacacactgatccaaaggttcctcacttcagagacaacgaatggaattttcaaagaggtgccgcttgtaccatcgatagatccttcggtactattgtcaaccacttgcaccaccacatcggcgattcccaccaatgtcaccacatgttctctcaaatgccattctacaatgctgtcgaagctactaagtatctaaaggccaagctaggtaagtactacatcttcgacgacactccaattgccaaggctttgtacagaaactggagagaatgtaaattcgtcgaagacgaaggtgatgttgttttctacaagcactaa

SEQ ID NO: 368 - DNA, 1212 bp, Artificial sequence
  Delta-15 Desaturase
atggcccctccacacgtcgtcgacgaacaagttagaagaagaatcgttgttgaagacgagattaagtcaaagaaacaattcgagagaaactacgtcccaatggatttcactatcaaggaaatcagagacgctatccctgctcacttattcatcagagacacaactaagtcaattctacacgttgtcaaagatttggttaccattgccattgttttctactgtgctaccttcatcgaaactttgccatccttggctttgagagttccagcatggatcacctactggattattcaaggtaccgtcatggttggtccatggattttggctcacgaatgtggtcacggtgccttttctaagcacaggaggttcaactccattatcggttgggtcttgcattccgctttgttggttccttatcaggcatgggcaatgtcacactctaagcaccacaagtttactggtactatggcgaaggatgtcgtcttcattccagctactcgttcctacaaaggtctacctgccctagaaaagcctgctgttgaagaagaagtttctgaacaagaacatcaccaccatgaagaatccatctttgctgaaaccccaatctacactttgggtgccttgttgttcgttttaaccttcggttggccattgtacctaattgttaacttctctggtcacgaagccccacactgggtcaaccacttccaaactgttgctccattgtacgaaccacaccaaagaaagaacatcttttactctaactgtggtattgttgctatgggctctattttgacctatttgtccatggttttctctccattaactgttttcatgtactacggtatcccatacttgggtgttaatgcttggattgtttgcattacttacttacaacacactgatccaaaggttcctcacttcagagacaacgaatggaattttcaaagaggtgccgcttgtaccatcgatagatccttcggtactattgtcaaccacttgcaccaccacatcggcgattcccaccaatgtcaccacatgttctctcaaatgccattctacaatgctgtcgaagctactaagtatctaaaggccaagctaggtaagtactacatcttcgacgacactccaattgccaaggctttgtacagaaactggagagaatgtaaattcgtcgaagacgaaggtgatgttgttttctacaagcactaa

SEQ ID NO: 369 - DNA, 1212 bp, Artificial sequence
  Delta-15 Desaturase
atggcccctccacacgtcgtcgacgaacaagttagaagaagaatcgttgttgaagacgagattaagtcaaagaaacaattcgagagaaactacgtcccaatggatttcactatcaaggaaatcagagacgctatccctgctcacttattcatcagagacacaactaagtcaattctacacgttgtcaaagatttggttaccattgccattgttttctactgtgctaccttcatcgaaactttgccatccttggctttgagagttccagcatggatcacctactggattattcaaggtaccgtcatggttggtccatggattttggctcacgaatgtggtcacggtgccttttctaaacacaagtcgatcaacaccattatcggttgggtcttgcattccgctttgttggttccttatcaggcatgggcaatgtcacactctaagcaccacaagtttactggtactatggcgaaggatgtcgtcttcattccagctactcgttcctacaaaggtctacctgccctagaaaagcctgctgttgaagaagaagtttctgaacaagaacatcaccaccatgaagaatccatctttgctgaaaccccaatctacactttgggtgccttgttgttcgttttaaccttcggttggccattgtacctaattgttaacttctctggtcacgaagccccacactgggtcaaccacttccaaactgttgctccattgtacgaaccacaccaaagaaagaacatcttttactctaactgtggtattgttgctatgggctctattttgacctatttgtccatggttttctctccattaactgttttcatgtactacggtatcccatacttgggtgttaatgcttggattgtttgcattacttacttacaacacactgatccaaaggttcctcacttcagagacaacgaatggaattttcaaagaggtgccgcttgtaccatcgatagatccttcggtactattgtcaaccacttgcaccaccacatcggcgattcccaccaatgtcaccacatgttctctcaaatgccattctacaatgctgtcgaagctactaagtatctaaaggccaagctaggtaagtactacatcttcgacgacactccaattgccaaggctttgtacagaaactggagagaatgtaaattcgtcgaagacgaaggtgatgttgttttctacaagcactaa

SEQ ID NO: 370 - DNA, 1212 bp, Artificial sequence
  Delta-15 Desaturase
atggcccctccacacgtcgtcgacgaacaagttagaagaagaatcgttgttgaagacgagattaagtcaaagaaacaattcgagagaaactacgtcccaatggatttcactatcaaggaaatcagagacgctatccctgctcacttattcatcagagacacaactaagtcaattctacacgttgtcaaagatttggttaccattgccattgttttctactgtgctaccttcatcgaaactttgccatccttggctttgagagttccagcatggatcacctactggattattcaaggtaccgtcatggttggtccatggattttggctcacgaatgtggtcacggtgccttttctaagtccaggtggatcaacaccattatcggttgggtcttgcattccgctttgttggttccttatcaggcatgggcaatgtcacactctaagcaccacaagtctactggtactatgactaaggatgttgtcttcattccagctactcgttcctacaaaggtctacctgccctagaaaagcctgctgttgaagaagaagtttctgaacaagaacatcaccaccatgaagaatccatctttgctgaaaccccaatctacactttgggtgccttgttgttcgttttaaccttcggttggccattgtacctaattgttaacttctctggtcacgaagccccacactgggtcaaccacttccaaactgttgctccattgtacgaaccacaccaaagaaagaacatcttttactctaactgtggtattgttgctatgggctctattttgacctatttgtccatggttttctctccattaactgttttcatgtactacggtatcccatacttgggtgttaatgcttggattgtttgcattacttacttacaacacactgatccaaaggttcctcacttcagagacaacgaatggaattttcaaagaggtgccgcttgtaccatcgatagatccttcggtactattgtcaaccacttgcaccaccacatcggcgattcccaccaatgtcaccacatgttctctcaaatgccattctacaatgctgtcgaagctactaagtatctaaaggccaagctaggtaagtactacatcttggacgacactccaattgccaaggctttgtacagaaactggagagaatgtaaattcgtcgaagacgaaggtgatgttgttttctacaagcactaa

SEQ ID NO: 371 - DNA, 1212 bp, Artificial sequence
  Delta-15 Desaturase
atggcccctccacacgtcgtcgacgaacaagttagaagaagaatcgttgttgaagacgagattaagtcaaagaaacaattcgagagaaactacgtcccaatggatttcactatcaaggaaatcagagacgctatccctgctcacttattcatcagagacacaactaagtcaattcaacacgttgtcaaagatttggttaccattgccattgttttctactgtgctaccttcatcgaaactttgccatccttggctttgagagttccagcatggatcacctactggattattcaaggtaccgtcatggttggtccatggattttggctcacgaatgtggtcacggtgccttttctgattccaagactatcaacactattttcggttgggtcttgcattccgctttgttggttccttatcaggcatgggcaatgtcacactctaagcaccacaagggtactggttccatgactaaggatgttgtcttcattccagctactgaatggcacgaaagtacccgaaacctagaaaagcctgctgttgaagaagaagtttctgaacaagaacatcaccaccatgaagaatccatctttgctgaaaccccaatctacactttgggtgccttgttgttcgttttaaccttcggttggccattgtacctaattgttaacttctctggtcacgaagccccacactgggtcaaccacttccaaactgttgctccattgtacgaaccacaccaaagaaagaacatcttttactctaactgtggtattgttgctatgggctctattttgacctatttgtccatggttttctctccattaactgttttcatgtactacggtatcccatacttgggtgttaatgcttggattgtttgcattacttacttacaacacactgatccaaaggttcctcacttcagagacaacgaatggaattttcaaagaggtgccgcttgtaccatcgatagatccttcggtactattgtcaaccacttgcaccaccacatcggcgattcccaccaatgtcaccacatgttctctcaaatgccattctacaatgctgtcgaagctactaagtatctaaaggccaagctaggtaagtactacatcttcgacgacactccaattgccaaggctttgtacagaaactggagagaatgtaaattcgtcgaagacgaaggtgatgttgttttctacaagcactaa

SEQ ID NO: 372 - DNA, 1212 bp, Artificial sequence
  Delta-15 Desaturase
atggcccctccacacgtcgtcgacgaacaagttagaagaagaatcgttgttgaagacgagattaagtcaaagaaacaattcgagagaaactacgtcccaatggatttcactatcaaggaaatcagagacgctatccctgctcacttattcatcagagacacaactaagtcaattctacacgttgtcaaagatttggttaccattgccattgttttctactgtgctaccttcatcgaaactttgccatccttggctttgagagttccagcatggatcacctactggattattcaaggtaccgtcatggttggtccatggattttggctcacgaatgtggtcacggtgccttttctgattccaagactatcaacactattttcggttgggtcttgcattccgctttgttggttccttatcaggcatgggcaatgtcacactctaagcaccacaagggtactggttccatgactaaggatgttgtcttcattccagctactgaaacggtcagaagtctcccagacctagaaaagcctgctgttgaagaagaagtttctgaacaagaacatcaccaccatgaagaatccatctttgctgaaaccccaatctacactttgggtgccttgttgttcgttttaaccttcggttggccattgtacctaattgttaacttctctggtcacgaagccccacactgggtcaaccacttccaaactgttgctccattgtacgaaccacaccaaagaaagaacatcttttactctaactgtggtattgttgctatgggctctattttgacctatttgtccatggttttctctccattaactgttttcatgtactacggtatcccatacttgggtgttaatgcttggattgtttgcattacttacttacaacacactgatccaaaggttcctcacttcagagacaacgaatggaattttcaaagaggtgccgcttgtaccatcgatagatccttcggtactattgtcaaccacttgcaccaccacatcggcgattcccaccaatgtcaccacatgttctctcaaatgccattctacaatgctgtcgaagctactaagtatctaaaggccaagctaggtaagtactacatcttcgacgacactccaattgccaaggctttgtacagaaactggagagaatgtaaattcgtcgaagacgaaggtgatgttgttttctacaagcactaa

SEQ ID NO: 373 - DNA, 1212 bp, Artificial sequence
  Delta-15 Desaturase
atggcccctccacacgtcgtcgacgaacaagttagaagaagaatcgttgttgaagacgagattaagtcaaagaaacaattcgagagaaactacgtcccaatggatttcactatcaaggaaatcagagacgctatccctgctcacttattcatcagagacacaactaagtcaattctacacgttgtcaaagatttggttaccattgccattgttttctactgtgctaccttcatcgaaactttgccatccttggctttgagagttccagcatggatcacctactggattattcaaggtaccgtcatggttggtccatggattttggctcacgaatgtggtcacggtgccttttctgattccaagactatcaacactattttcggttgggtcttgcattccgctttgttggttccttatcaggcatgggcaatgtcacactctaagcaccacaagggtactggttccatgactaaggatgttgtcttcattccagctactcgttcctacaaaggtctacctgccctagaaaagcctgctgttgaagaagaagtttctgaacaagaacatcaccaccatgaagaatccatctttgctgaaaccccaatctacactttgggtgccttgttgttcgttttaaccttcggttggccattgtacctaattgttaacttctctggtcacgaagccccacactgggtcaaccacttccaaactgtctctacatttttcaaagatcagcaaagaaagaacatcttttactctaactgtggtattgttgctatgggctctattttgacctatttgtccatggttttctctccattaactgttttcatgtactacggtatcccatacttgggtgttaatgcttggattgtttgcattacttacttacaacacactgatccaaaggttcctcacttcagagacaacgaatggaattttcaaagaggtgccgcttgtaccatcgatagatccttcggtactattgtcaaccacttgcaccaccacatcggcgattcccaccaatgtcaccacatgttctctcaaatgccattctacaatgctgtcgaagctactaagtatctaaaggccaagctaggtaagtactacatcttcgacgacactccaattgccaaggctttgtacagaaactggagagaatgtaaattcgtcgaagacgaaggtgatgttgttttctacaagcactaa

SEQ ID NO: 374 - DNA, 1212 bp, Artificial sequence
  Delta-15 Desaturase
atggcccctccacacgtcgtcgacgaacaagttagaagaagaatcgttgttgaagacgagattaagtcaaagaaacaattcgagagaaactacgtcccaatggatttcactatcaaggaaatcagagacgctatccctgctcacttattcatcagagacacaactaagtcaattctacacgttgtcaaagatttggttaccattgccattgttttctactgtgctaccttcatcgaaactttgccatccttggctttgagagttccagcatggatcacctactggattattcaaggtaccgtcatggttggtccatggattttggctcacgaatgtggtcacggtgccttttctcactacaggaggttcaactccattttgggttgggtcttgcattccgctttgttggttccttatcaggcatgggcaatgtcacactctaagcaccacaagtttactggtactatggcgaaggatgtcgtcttcattccagctactcgttcctacaaaggtctacctgccctatatattgtttccaggaataaagaagtttctgaacaagaacatcaccaccatgaagaatccatctttgctgaaaccccaatctacactttgggtgccttgttgttcgttttaaccttcggttggccattgtacctaattgttaacttctctggtcacgaagccccacactgggtcaaccacttccaaactgttgctccattgtacgaaccacaccaaagaaagaacatcttttactctaactgtggtattgttgctatgggctctattttgacctatttgtccatggttttctctccattaactgttttcatgtactacggtatcccatacttgggtgttaatgcttggattgtttgcattacttacttacaacacactgatccaaaggttcctcacttcagagacaacgaatggaattttcaaagaggtgccgcttgtaccatcgatagatccttcggtactattgtcaaccacttgcaccaccacatcggcgattcccaccaatgtcaccacatgttctctcaaatgccattctacaatgctgtcgaagctactaagtatctaaaggccaagctaggtaagtactacatcttcgacgacactccaattgccaaggctttgtacagaaactggagagaatgtaaattcgtcgaagacgaaggtgatgttgttttctacaagcactaa

SEQ ID NO: 375 - DNA, 1212 bp, Artificial sequence
  Delta-15 Desaturase
atggcccctccacacgtcgtcgacgaacaagttagaagaagaatcgttgttgaagacgagattaagtcaaagaaacaattcgagagaaactacgtcccaatggatttcactatcaaggaaatcagagacgctatccctgctcacttattcatcagagacacaactaagtcaattctacacgttgtcaaagatttggttaccattgccattgttttctactgtgctaccttcatcgaaactttgccatccttggctttgagagttccagcatggatcacctactggattattcaaggtaccgtcatggttggtccatggattttggctcacgaatgtggtcacggtgccttttctcactacaggaggttcaactccattttgggttgggtcttgcattccgctttgttggttccttatcaggcatgggcaatgtcacactctaagcaccacaagtttactggtactatggcgaaggatgtcgtcttcattccagctactcgttcctacaaaggtctacctgcccgatcttttgttgccggggataatgaagtttctgaacaagaacatcaccaccatgaagaatccatctttgctgaaaccccaatctacactttgggtgccttgttgttcgttttaaccttcggttggccattgtacctaattgttaacttctctggtcacgaagccccacactgggtcaaccacttccaaactgttgctccattgtacgaaccacaccaaagaaagaacatcttttactctaactgtggtattgttgctatgggctctattttgacctatttgtccatggttttctctccattaactgttttcatgtactacggtatcccatacttgggtgttaatgcttggattgtttgcattacttacttacaacacactgatccaaaggttcctcacttcagagacaacgaatggaattttcaaagaggtgccgcttgtaccatcgatagatccttcggtactattgtcaaccacttgcaccaccacatcggcgattcccaccaatgtcaccacatgttctctcaaatgccattctacaatgctgtcgaagctactaagtatctaaaggccaagctaggtaagtactacatcttcgacgacactccaattgccaaggctttgtacagaaactggagagaatgtaaattcgtcgaagacgaaggtgatgttgttttctacaagcactaa

SEQ ID NO: 376 - DNA, 1212 bp, Artificial sequence
  Delta-15 Desaturase
atggcccctccacacgtcgtcgacgaacaagttagaagaagaatcgttgttgaagacgagattaagtcaaagaaacaattcgagagaaactacgtcccaatggatttcactatcaaggaaatcagagacgctatccctgctcacttattcatcagagacacaactaagtcaattctacacgttgtcaaagatttggttaccattgccattgttttctactgtgctaccttcatcgaaactttgccatccttggctttgagagttccagcatggatcacctactggattattcaaggtaccgtcatggttggtccatggattttggctcacgaatgtggtcacggtgccttttctcactacaggaggttcaactccattttgggttgggtcttgcattccgctttgttggttccttatcaggcatgggcaatgtcacactctaagcaccacaagtttactggtactatggcgaaggatgtcgtcttcattccagctactcgttcctacaaaggtctacctgccctagaaaagcctgctgttgaagaagaagtttctgaacaagaacatcaccaccatgaagaatccatctttgctgaaaccccaatctacactttgggtgccttgttgttcgttttaaccttcggttggccattgtacctaattgttaacttctctggtcacgaagccccacactgggtcaaccacttccaaactgttgctccattgtacgaaccacaccaaagaaagaacatcttttactctaactgtggtattgttgctatgggctctattttgacctatttgtccatggttttctctccattaactgttttcatgtactacggtatcccatacttgggtgttaatgcttggattgtttgcattacttacttacaacacactgatccaaaggttcctcacttcagagacaacgaatggaattttcaaagaggtgccgcttgtaccatcgatagatccttcggtactattgtcaaccacttgcaccaccacatcggcgattcccaccaatgtcaccacatgttctctcaaatgccattctacaatgctgtcgaagctactaagtatctaaaggccaagctaggtaagtactacatcttcgacgacactccaattgccaaggctttgtacagaaactggagagaatgtaaattcgtcgaagacgaaggtgatgttgttttctacaagcactaa

SEQ ID NO: 377 - DNA, 1212 bp, Artificial sequence
  Delta-15 Desaturase
atggcccctccacacgtcgtcgacgaacaagttagaagaagaatcgttgttgaagacgagattaagtcaaagaaacaattcgagagaaactacgtcccaatggatttcactatcaaggaaatcagagacgctatccctgctcacttattcatcagagacacaactaagtcaattctacacgttgtcaaagatttggttaccattgccattgttttctactgtgctaccttcatcgaaactttgccatccttggctttgagagttccagcatggatcacctactggattattcaaggtaccgtcatggttggtccatggattttggctcacgaatgtggtcacggtgccttttctaaatacaagtggttcaactccattatcggttgggtcttgcattccgctttgttggttccttatcaggcatgggcaatgtcacactctaagcaccacaagtttactggtactatgactaaggatgttgtcttcattccagctactcgttcctacaaaggtctacctgccctagaaaagcctgctgttgaagaagaagtttctgaacaagaacatcaccaccatgaagaatccatctttgctgaaaccccaatctacactttgggtgccttgttgttcgttttaaccttcggttggccattgtacctaattgttaacttctctggtcacgaagccccacactgggtcaaccacttccaacctggctctgcacttttcggacctcggcaaagaaagaacatcttttactctaactgtggtattgttgctatgggctctattttgacctatttgtccatggttttctctccattaactgttttcatgtactacggtatcccatacttgggtgttaatgcttggattgtttgcattacttacttacaacacactgatccaaaggttcctcacttcagagacaacgaatggaattttcaaagaggtgccgcttgtaccatcgatagatccttcggtactattgtcaaccacttgcaccaccacatcggcgattcccaccaatgtcaccacatgttctctcaaatgccattctacaatgctgtcgaagctactaagtatctaaaggccaagctaggtaagtactacatcttcgacgacactccaattgccaaggctttgtacagaaactggagagaatgtaaattcgtcgaagacgaaggtgatgttgttttctacaagcactaa

SEQ ID NO: 378 - DNA, 1212 bp, Artificial sequence
  Delta-15 Desaturase
atggcccctccacacgtcgtcgacgaacaagttagaagaagaatcgttgttgaagacgagattaagtcaaagaaacaattcgagagaaactacgtcccaatggatttcactatcaaggaaatcagagacgctatccctgctcacttattcatcagagacacaactaagtcaattctacacgttgtcaaagatttggttaccattgccattgttttctactgtgctaccttcatcgaaactttgccatccttggctttgagagttccagcatggatcacctactggattattcaaggtaccgtcatggttggtccatggattttggctcacgaatgtggtcacggtgccttttctcactacaggaggttcaactccattttgggttgggtcttgcattccgctttgttggttccttatcaggcatgggcaatgtcacactctaagcaccacaagtttactggtactatggcgaaggatgtcgtcttcattccagctactcgttcctacaaaggtctacctgcccgagattatgttgactgggaggaagaagtttctgaacaagaacatcaccaccatgaagaatccatctttgctgaaaccccaatctacactttgggtgccttgttgttcgttttaaccttcggttggccattgtacctaattgttaacttctctggtcacgaagccccacactgggtcaaccacttccaaactgttgctccattgtacgaaccacaccaaagaaagaacatcttttactctaactgtggtattgttgctatgggctctattttgacctatttgtccatggttttctctccattaactgttttcatgtactacggtatcccatacttgggtgttaatgcttggattgtttgcattacttacttacaacacactgatccaaaggttcctcacttcagagacaacgaatggaattttcaaagaggtgccgcttgtaccatcgatagatccttcggtactattgtcaaccacttgcaccaccacatcggcgattcccaccaatgtcaccacatgttctctcaaatgccattctacaatgctgtcgaagctactaagtatctaaaggccaagctaggtaagtactacatcttcgacgacactccaattgccaaggctttgtacagaaactggagagaatgtaaattcgtcgaagacgaaggtgatgttgttttctacaagcactaa

SEQ ID NO: 379 - DNA, 1212 bp, Artificial sequence
  Delta-15 Desaturase
atggcccctccacacgtcgtcgacgaacaagttagaagaagaatcgttgttgaagacgagattaagtcaaagaaacaattcgagagaaactacgtcccaatggatttcactatcaaggaaatcagagacgctatccctgctcacttattcatcagagacacaactaagtcaattctacacgttgtcaaagatttggttaccattgccattgttttctactgtgctaccttcatcgaaactttgccatccttggctttgagagttccagcatggatcacctactggattattcaaggtaccgtcatggttggtccatggattttggctcacgaatgtggtcacggtgccttttctaaatacaggtcgatcaactacattatgggttgggtcttgcattccgctttgttggttccttatcaggcatgggcaatgtcacactctaagcaccacaaggctactggtaatatggcgaaggatatggtcttcattccagctactcgttcctacaaaggtctacctgccctagaaaagcctgctgttgaagaagaagtttctgaacaagaacatcaccaccatgaagaatccatctttgctgaaaccccaatctacactttgggtgccttgttgttcgttttaaccttcggttggccattgtacctaattgttaacttctctggtcacgaagccccacactgggtcaaccacttccaagctacctcttcaattttcgcaactaatcaaagaaagaacatcttttactctaactgtggtattgttgctatgggctctattttgacctatttgtccatggttttctctccattaactgttttcatgtactacggtatcccatacttgggtgttaatgcttggattgtttgcattacttacttacaacacactgatccaaaggttcctcacttcagagacaacgaatggaattttcaaagaggtgccgcttgtaccatcgatagatccttcggtactattgtcaaccacttgcaccaccacatcggcgattcccaccaatgtcaccacatgttctctcaaatgccattctacaatgctgtcgaagctactaagtatctaaaggccaagctaggtaagtactacatcttcgacgacactccaattgccaaggctttgtacagaaactggagagaatgtaaattcgtcgaagacgaaggtgatgttgttttctacaagcactaa

SEQ ID NO: 380 - DNA, 1212 bp, Artificial sequence
  Delta-15 Desaturase
atggcccctccacacgtcgtcgacgaacaagttagaagaagaatcgttgttgaagacgagattaagtcaaagaaacaattcgagagaaactacgtcccaatggatttcactatcaaggaaatcagagacgctatccctgctcacttattcatcagagacacaactaagtcaattctacacgttgtcaaagatttggttaccattgccattgttttctactgtgctaccttcatcgaaactttgccatccttggctttgagagttccagcatggatcacctactggattattcaaggtaccgtcatggttggtccatggattttggctcacgaatgtggtcacggtgccttttctaaatacaggtcgatcaactacattatgggttgggtcttgcattccgctttgttggttccttatcaggcatgggcaatgtcacactctaagcaccacaaggctactggtaatatggcgaaggatatggtcttcattccagctactcgttcctacaaaggtctacctgccctagaaaagcctgctgttgaagaagaagtttctgaacaagaacatcaccaccatgaagaatccatctttgctgaaaccccaatctacactttgggtgccttgttgttcgttttaaccttcggttggccattgtacctaattgttaacttctctggtaacgaagccccacactgggtcaaccacttccaagctgtcactccacttttcgcagataggcaaagaaagaacatcttttactctaactgtggtattgttgctatgggctctattttgacctatttgtccatggttttctctccattaactgttttcatgtactacggtatcccatacttgggtgttaatgcttggattgtttgcattacttacttacaacacactgatccaaaggttcctcacttcagagacaacgaatggaattttcaaagaggtgccgcttgtaccatcgatagatccttcggtactattgtcaaccacttgcaccaccacatcggcgattcccaccaatgtcaccacatgttctctcaaatgccattctacaatgctgtcgaagctactaagtatctaaaggccaagctaggtaagtactacatcttcgacgacactccaattgccaaggctttgtacagaaactggagagaatgtaaattcgtcgaagacgaaggtgatgttgttttctacaagcactaa

SEQ ID NO: 381 - DNA, 1212 bp, Artificial sequence
  Delta-15 Desaturase
atggcccctccacacgtcgtcgacgaacaagttagaagaagaatcgttgttgaagacgagattaagtcaaagaaacaattcgagagaaactacgtcccaatggatttcactatcaaggaaatcagagacgctatccctgctcacttattcatcagagacacaactaagtcaattctacacgttgtcaaagatttggttaccattgccattgttttctactgtgctaccttcatcgaaactttgccatccttggctttgagagttccagcatggatcacctactggattattcaaggtaccgtcatggttggtccatggattttggctcacgaatgtggtcacggtgccttttctaaatacaagtggttcaactccattatcggttgggtcttgcattccgctttgttggttccttatcaggcatgggcaatgtcacactctaagcaccacaagtttactggtactatgactaaggatgttgtcttcattccagctactcgttcctacaaaggtctacctgccctagaaaagcctgctgttgaagaagaagtttctgaacaagaacatcaccaccatgaagaatccatctttgctgaaaccccaatctacactttgggtgccttgttgttcgttttaaccttcggttggccattgtacctaattgttaacttctctggtcacgaagccccacactgggtcaaccacttccaacctgcctctccacttttcggaacaaagcaaagaaagaacatcttttactctaactgtggtattgttgctatgggctctattttgacctatttgtccatggttttctctccattaactgttttcatgtactacggtatcccatacttgggtgttaatgcttggattgtttgcattacttacttacaacacactgatccaaaggttcctcacttcagagacaacgaatggaattttcaaagaggtgccgcttgtaccatcgatagatccttcggtactattgtcaaccacttgcaccaccacatcggcgattcccaccaatgtcaccacatgttctctcaaatgccattctacaatgctgtcgaagctactaagtatctaaaggccaagctaggtaagtactacatcttcgacgacactccaattgccaaggctttgtacagaaactggagagaatgtaaattcgtcgaagacgaaggtgatgttgttttctacaagcactaa

SEQ ID NO: 382 - DNA, 1212 bp, Artificial sequence
  Delta-15 Desaturase
atggcccctccacacgtcgtcgacgaacaagttagaagaagaatcgttgttgaagacgagattaagtcaaagaaacaattcgagagaaactacgtcccaatggatttcactatcaaggaaatcagagacgctatccctgctcacttattcatcagagacacaactaagtcaattctacacgttgtcaaagatttggttaccattgccattgttttctactgtgctaccttcatcgaaactttgccatccttggctttgagagttccagcatggatcacctactggattattcaaggtaccgtcatggttggtccatggattttggctcacgaatgtggtcacggtgccttttctcatcacaagtggttcaacaccattttgggttgggtcttgcattccgctttgttggttccttatcaggcatgggcaatgtcacactctaagcaccacaagtttactggtactatggcgaaggatgtcgtcttcattccagctactcgttcctacaaaggtctacctgcccgagattatgcttccgtgaatgatgaagtgtctgaacaagaacatcaccaccatgaagaatccatctttgctgaaaccccaatctacactttgggtgccttgttgttcgttttaaccttcggttggccattgtacctaattgttaacttctctggtcacgaagccccacactgggtcaaccacttccaaactgttgctccattgtacgaaccacaccaaagaaagaacatcttttactctaactgtggtattgttgctatgggctctattttgacctatttgtccatggttttctctccattaactgttttcatgtactacggtatcccatacttgggtgttaatgcttggattgtttgcattacttacttacaacacactgatccaaaggttcctcacttcagagacaacgaatggaattttcaaagaggtgccgcttgtaccatcgatagatccttcggtactattgtcaaccacttgcaccaccacatcggcgattcccaccaatgtcaccacatgttctctcaaatgccattctacaatgctgtcgaagctactaagtatctaaaggccaagctaggtaagtactacatcttcgacgacactccaattgccaaggctttgtacagaaactggagagaatgtaaattcgtcgaagacgaaggtgatgttgttttctacaagcactaa

SEQ ID NO: 383 - DNA, 1212 bp, Artificial sequence
  Delta-15 Desaturase
atggcccctccacacgtcgtcgacgaacaagttagaagaagaatcgttgttgaagacgagattaagtcaaagaaacaattcgagagaaactacgtcccaatggatttcactatcaaggaaatcagagacgctatccctgctcacttattcatcagagacacaactaagtcaattctacacgttgtcaaagatttggttaccattgccattgttttctactgtgctaccttcatcgaaactttgccatccttggctttgagagttccagcatggatcacctactggattattcaaggtaccgtcatggttggtccatggattttggctcacgaatgtggtcacggtgccttttctcatcacaagtggttcaacaccattttgggttgggtcttgcattccgctttgttggttccttatcaggcatgggcaatgtcacactctaagcaccacaagtttactggtactatggcgaaggatgtcgtcttcattccagctactcgttcctacaaaggtctacctgcccgatctattgttgccttgaataaagaagtttctgaacaagaacatcaccaccatgaagaatccatctttgctgaaaccccaatctacactttgggtgccttgttgttcgttttaaccttcggttggccattgtacctaattgttaacttctctggtcacgaagccccacactgggtcaaccacttccaaactgttgctccattgtacgaaccacaccaaagaaagaacatcttttactctaactgtggtattgttgctatgggctctattttgacctatttgtccatggttttctctccattaactgttttcatgtactacggtatcccatacttgggtgttaatgcttggattgtttgcattacttacttacaacacactgatccaaaggttcctcacttcagagacaacgaatggaattttcaaagaggtgccgcttgtaccatcgatagatccttcggtactattgtcaaccacttgcaccaccacatcggcgattcccaccaatgtcaccacatgttctctcaaatgccattctacaatgctgtcgaagctactaagtatctaaaggccaagctaggtaagtactacatcttcgacgacactccaattgccaaggctttgtacagaaactggagagaatgtaaattcgtcgaagacgaaggtgatgttgttttctacaagcactaa

SEQ ID NO: 384 - DNA, 1212 bp, Artificial sequence
  Delta-15 Desaturase
atggcccctccacacgtcgtcgacgaacaagttagaagaagaatcgttgttgaagacgagattaagtcaaagaaacaattcgagagaaactacgtcccaatggatttcactatcaaggaaatcagagacgctatccctgctcacttattcatcagagacacaactaagtcaattctacacgttgtcaaagatttggttaccattgccattgttttctactgtgctaccttcatcgaaactttgccatccttggctttgagagttccagcatggatcacctactggattattcaaggtaccgtcatggttggtccatggattttggctcacgaatgtggtcacggtgccttttctcatcacaagtggttcaacaccattttgggttgggtcttgcattccgctttgttggttccttatcaggcatgggcaatgtcacactctaagcaccacaagtttactggtactatggcgaaggatgtcgtcttcattccagctactcgttcctacaaaggtctacctgccgtatctgttccttccatgaaggatgaagtttcggaacaagaacatcaccaccatgaagaatccatctttgctgaaaccccaatctacactttgggtgccttgttgttcgttttaaccttcggttggccattgtacctaattgttaacttctctggtcacgaagccccacactgggtcaaccacttccaaactgttgctccattgtacgaaccacaccaaagaaagaacatcttttactctaactgtggtattgttgctatgggctctattttgacctatttgtccatggttttctctccattaactgttttcatgtactacggtatcccatacttgggtgttaatgcttggattgtttgcattacttacttacaacacactgatccaaaggttcctcacttcagagacaacgaatggaattttcaaagaggtgccgcttgtaccatcgatagatccttcggtactattgtcaaccacttgcaccaccacatcggcgattcccaccaatgtcaccacatgttctctcaaatgccattctacaatgctgtcgaagctactaagtatctaaaggccaagctaggtaagtactacatcttcgacgacactccaattgccaaggctttgtacagaaactggagagaatgtaaattcgtcgaagacgaaggtgatgttgttttctacaagcactaa

SEQ ID NO: 385 - DNA, 1212 bp, Artificial sequence
  Delta-15 Desaturase
atggcccctccacacgtcgtcgacgaacaagttagaagaagaatcgttgttgaagacgagattaagtcaaagaaacaattcgagagaaactacgtcccaatggatttcactatcaaggaaatcagagacgctatccctgctcacttattcatcagagacacaactaagtcaattctacacgttgtcaaagatttggttaccattgccattgttttctactgtgctaccttcatcgaaactttgccatccttggctttgagagttccagcatggatcacctactggattattcaaggtaccgtcatggttggtccatggattttggctcacgaatgtggtcacggtgccttttctcatcacaagtggttcaacaccattttgggttgggtcttgcattccgctttgttggttccttatcaggcatgggcaatgtcacactctaagcaccacaagtttactggtactatggcgaaggatgtcgtcttcattccagctactcgttcctacaaaggtctacctgccctagctattcttgacgtgcaggatgaagtttctgaacaagaacatcaccaccatgaagaatccatctttgctgaaaccccaatctacactttgggtgccttgttgttcgttttaaccttcggttggccattgtacctaattgttaacttctctggtcacgaagccccacactgggtcaaccacttccaaactgttgctccattgtacgaaccacaccaaagaaagaacatcttttactctaactgtggtattgttgctatgggctctattttgacctatttgtccatggttttctctccattaactgttttcatgtactacggtatcccatacttgggtgttaatgcttggattgtttgcattacttacttacaacacactgatccaaaggttcctcacttcagagacaacgaatggaattttcaaagaggtgccgcttgtaccatcgatagatccttcggtactattgtcaaccacttgcaccaccacatcggcgattcccaccaatgtcaccacatgttctctcaaatgccattctacaatgctgtcgaagctactaagtatctaaaggccaagctaggtaagtactacatcttcgacgacactccaattgccaaggctttgtacagaaactggagagaatgtaaattcgtcgaagacgaaggtgatgttgttttctacaagcactaa

SEQ ID NO: 386 - DNA, 1212 bp, Artificial sequence
  Delta-15 Desaturase
atggcccctccacacgtcgtcgacgaacaagttagaagaagaatcgttgttgaagacgagattaagtcaaagaaacaattcgagagaaactacgtcccaatggatttcactatcaaggaaatcagagacgctatccctgctcacttattcatcagagacacaactaagtcaattctacacgttgtcaaagatttggttaccattgccattgttttctactgtgctaccttcatcgaaactttgccatccttggctttgagagttccagcatggatcacctactggattattcaaggtaccgtcatggttggtccatggattttggctcacgaatgtggtcacggtgccttttctaaacacaggaggatcaacaccattatcggttgggtcttgcattccgctttgttggttccttatcaggcattggcaatgtcacactctaagcaccacaagggtactggttccatggagaaggatttggtcttcattccagctactcgttcctacaaaggtctacctgccctagaaaagcctgctgttgaagaagaagtttctgaacaagaacatcaccaccatgaagaatccatctttgctgaaaccccaatctacactttgggtgccttgttgttcgttttaaccttcggttggccattgtacctaattgttaacttctctggtcacgaagccccacactgggtcaaccacttccaatctacctctacacttttcgaagcacgtcaaagaaagaacatcttttactctaactgtggtattgttgctatgggctctattttgacctatttgtccatggttttctctccattaactgttttcatgtactacggtatcccatacttgggtgttaatgcttggattgtttgcattacttacttacaacacactgatccaaaggttcctcacttcagagacaacgaatggaattttcaaagaggtgccgcttgtaccatcgatagatccttcggtactattgtcaaccacttgcaccaccacatcggcgattcccaccaatgtcaccacatgttctctcaaatgccattctacaatgctgtcgaagctactaagtatctaaaggccaagctaggtaagtactacatcttcgacgacactccaattgccaaggctttgtacagaaactggagagaatgtaaattcgtcgaagacgaaggtgatgttgttttctacaagcactaa

SEQ ID NO: 387 - DNA, 1212 bp, Artificial sequence
  Delta-15 Desaturase
atggcccctccacacgtcgtcgacgaacaagttagaagaagaatcgttgttgaagacgagattaagtcaaagaaacaattcgagagaaactacgtcccaatggatttcactatcaaggaaatcagagacgctatccctgctcacttattcatcagagacacaactaagtcaattctacacgttgtcaaagatttggttaccattgccattgttttctactgtgctaccttcatcgaaactttgccatccttggctttgagagttccagcatggatcacctactggattattcaaggtaccgtcatggttggtccatggattttggctcacgaatgtggtcacggtgccttttctcatcacaagtggttcaacaccattttgggttgggtcttgcattccgctttgttggttccttatcaggcatgggcaatgtcacactctaagcaccacaagtttactggtactatggcgaaggatgtcgtcttcattccagctactcgttcctacaaaggtctacctgccgtatcttatctttacatgaagaaagaagtttctgaacaagaacatcaccaccatgaagaatccatctttgctgaaaccccaatctacactttgggtgccttgttgttcgttttaaccttcggttggccattgtacctaattgttaacttctctggtcacgaagccccacactgggtcaaccacttccaaactgttgctccattgtacgaaccacaccaaagaaagaacatcttttactctaactgtggtattgttgctatgggctctattttgacctatttgtccatggttttctctccattaactgttttcatgtactacggtatcccatacttgggtgttaatgcttggattgtttgcattacttacttacaacacactgatccaaaggttcctcacttcagagacaacgaatggaattttcaaagaggtgccgcttgtaccatcgatagatccttcggtactattgtcaaccacttgcaccaccacatcggcgattcccaccaatgtcaccacatgttctctcaaatgccattctacaatgctgtcgaagctactaagtatctaaaggccaagctaggtaagtactacatcttcgacgacactccaattgccaaggctttgtacagaaactggagagaatgtaaattcgtcgaagacgaaggtgatgttgttttctacaagcactaa

SEQ ID NO: 388 - DNA, 1212 bp, Artificial sequence
  Delta-15 Desaturase
atggcccctccacacgtcgtcgacgaacaagttagaagaagaatcgttgttgaagacgagattaagtcaaagaaacaattcgagagaaactacgtcccaatggatttcactatcaaggaaatcagagacgctatccctgctcacttattcatcagagacacaactaagtcaattctacacgttgtcaaagatttggttaccattgccattgttttctactgtgctaccttcatcgaaactttgccatccttggctttgagagttccagcatggatcacctactggattattcaaggtaccgtcatggttggtccatggattttggctcacgaatgtggtcacggtgccttttctaaatacaagtggttcaactccattatcggttgggtcttgcattccgctttgttggttccttatcaggcatgggcaatgtcacactctaagcaccacaagtttactggtactatgactaaggatgttgtcttcattccagctactcgttcctacaaaggtctacctgccgtaaatgttcttgccagggaggatgaagtttctgaacaagaacatcaccaccatgaagaatccatctttgctgaaaccccaatctacactttgggtgccttgttgttcgttttaaccttcggttggccattgtacctaattgttaacttctctggtcacgaagccccacactgggtcaaccacttccaaactgttgctccattgtacgaaccacaccaaagaaagaacatcttttactctaactgtggtattgttgctatgggctctattttgacctatttgtccatggttttctctccattaactgttttcatgtactacggtatcccatacttgggtgttaatgcttggattgtttgcattacttacttacaacacactgatccaaaggttcctcacttcagagacaacgaatggaattttcaaagaggtgccgcttgtaccatcgatagatccttcggtactattgtcaaccacttgcaccaccacatcggcgattcccaccaatgtcaccacatgttctctcaaatgccattctacaatgctgtcgaagctactaagtatctaaaggccaagctaggtaagtactacatcttcgacgacactccaattgccaaggctttgtacagaaactggagagaatgtaaattcgtcgaagacgaaggtgatgttgttttctacaagcactaa

SEQ ID NO: 389 - DNA, 1212 bp, Artificial sequence
  Delta-15 Desaturase
atggcccctccacacgtcgtcgacgaacaagttagaagaagaatcgttgttgaagacgagattaagtcaaagaaacaattcgagagaaactacgtcccaatggatttcactatcaaggaaatcagagacgctatccctgctcacttattcatcagagacacaactaagtcaattctacacgttgtcaaagatttggttaccattgccattgttttctactgtgctaccttcatcgaaactttgccatccttggctttgagagttccagcatggatcacctactggattattcaaggtaccgtcatggttggtccatggattttggctcacgaatgtggtcacggtgccttttctaaatacaagtggttcaactccattatcggttgggtcttgcattccgctttgttggttccttatcaggcatgggcaatgtcacactctaagcaccacaagtttactggtactatgactaaggatgttgtcttcattccagctactcgttcctacaaaggtctacctgcccgagatattgtttacatggatgaagaagtttctgaacaagaacatcaccaccatgaagaatccatctttgctgaaaccccaatctacactttgggtgccttgttgttcgttttaaccttcggttggccattgtacctaattgttaacttctctggtcacgaagccccacactgggtcaaccacttccaaactgttgctccattgtacgaaccacaccaaagaaagaacatcttttactctaactgtggtattgttgctatgggctctattttgacctatttgtccatggttttctctccattaactgttttcatgtactacggtatcccatacttgggtgttaatgcttggattgtttgcattacttacttacaacacactgatccaaaggttcctcacttcagagacaacgaatggaattttcaaagaggtgccgcttgtaccatcgatagatccttcggtactattgtcaaccacttgcaccaccacatcggcgattcccaccaatgtcaccacatgttctctcaaatgccattctacaatgctgtcgaagctactaagtatctaaaggccaagctaggtaagtactacatcttcgacgacactccaattgccaaggctttgtacagaaactggagagaatgtaaattcgtcgaagacgaaggtgatgttgttttctacaagcactaa

SEQ ID NO: 390 - DNA, 1212 bp, Artificial sequence
  Delta-15 Desaturase
atggcccctccacacgtcgtcgacgaacaagttagaagaagaatcgttgttgaagacgagattaagtcaaagaaacaattcgagagaaactacgtcccaatggatttcactatcaaggaaatcagagacgctatccctgctcacttattcatcagagacacaactaagtcaattctacacgttgtcaaagatttggttaccattgccattgttttctactgtgctaccttcatcgaaactttgccatccttggctttgagagttccagcatggatcacctactggattattcaaggtaccgtcatggttggtccatggattttggctcacgaatgtggtcacggtgccttttctaaacacaggaggatcaacaccattatcggttgggtcttgcattccgctttgttggttccttatcaggcattggcaatgtcacactctaagcaccacaagggtactggttccatggagaaggatttggtcttcattccagctactcgttcctacaaaggtctacctgccgtatctattcctgacagggatgaagaagtttctgaacaagaacatcaccaccatgaagaatccatctttgctgaaaccccaatctacactttgggtgccttgttgttcgttttaaccttcggttggccattgtacctaattgttaacttctctggtcacgaagccccacactgggtcaaccacttccaaactgttgctccattgtacgaaccacaccaaagaaagaacatcttttactctaactgtggtattgttgctatgggctctattttgacctatttgtccatggttttctctccattaactgttttcatgtactacggtatcccatacttgggtgttaatgcttggattgtttgcattacttacttacaacacactgatccaaaggttcctcacttcagagacaacgaatggaattttcaaagaggtgccgcttgtaccatcgatagatccttcggtactattgtcaaccacttgcaccaccacatcggcgattcccaccaatgtcaccacatgttctctcaaatgccattctacaatgctgtcgaagctactaagtatctaaaggccaagctaggtaagtactacatcttcgacgacactccaattgccaaggctttgtacagaaactggagagaatgtaaattcgtcgaagacgaaggtgatgttgttttctacaagcactaa

SEQ ID NO: 391 - DNA, 1212 bp, Artificial sequence
  Delta-15 Desaturase
atggcccctccacacgtcgtcgacgaacaagttagaagaagaatcgttgttgaagacgagattaagtcaaagaaacaattcgagagaaactacgtcccaatggatttcactatcaaggaaatcagagacgctatccctgctcacttattcatcagagacacaactaagtcaattctacacgttgtcaaagatttggttaccattgccattgttttctactgtgctaccttcatcgaaactttgccatccttggctttgagagttccagcatggatcacctactggattattcaaggtaccgtcatggttggtccatggattttggctcacgaatgtggtcacggtgccttttctaaacacaggaggatcaacaccattatcggttgggtcttgcattccgctttgttggttccttatcaggcattggcaatgtcacactctaagcaccacaagggtactggttccatggagaaggatttggtcttcattccagctactcgttcctacaaaggtctacctgccctatattttgctgacttggataaagaagtgtctgaacaagaacatcaccaccatgaagaatccatctttgctgaaaccccaatctacactttgggtgccttgttgttcgttttaaccttcggttggccattgtacctaattgttaacttctctggtcacgaagccccacactgggtcaaccacttccaaactgttgctccattgtacgaaccacaccaaagaaagaacatcttttactctaactgtggtattgttgctatgggctctattttgacctatttgtccatggttttctctccattaactgttttcatgtactacggtatcccatacttgggtgttaatgcttggattgtttgcattacttacttacaacacactgatccaaaggttcctcacttcagagacaacgaatggaattttcaaagaggtgccgcttgtaccatcgatagatccttcggtactattgtcaaccacttgcaccaccacatcggcgattcccaccaatgtcaccacatgttctctcaaatgccattctacaatgctgtcgaagctactaagtatctaaaggccaagctaggtaagtactacatcttcgacgacactccaattgccaaggctttgtacagaaactggagagaatgtaaattcgtcgaagacgaaggtgatgttgttttctacaagcactaa

SEQ ID NO: 392 - DNA, 1212 bp, Artificial sequence
  Delta-15 Desaturase
atggcccctccacacgtcgtcgacgaacaagttagaagaagaatcgttgttgaagacgagattaagtcaaagaaacaattcgagagaaactacgtcccaatggatttcactatcaaggaaatcagagacgctatccctgctcacttattcatcagagacacaactaagtcaattctacacgttgtcaaagatttggttaccattgccattgttttctactgtgctaccttcatcgaaactttgccatccttggctttgagagttccagcatggatcacctactggattattcaaggtaccgtcatggttggtccatggattttggctcacgaatgtggtcacggtgccttttctaaacacaggaggatcaacaccattatcggttgggtcttgcattccgctttgttggttccttatcaggcattggcaatgtcacactctaagcaccacaagggtactggttccatggagaaggatttggtcttcattccagctactcgttcctacaaaggtctacctgcccgagatgatccttacatgaataaagaagtttctgaacaagaacatcaccaccatgaagaatccatctttgctgaaaccccaatctacactttgggtgccttgttgttcgttttaaccttcggttggccattgtacctaattgttaacttctctggtcacgaagccccacactgggtcaaccacttccaaactgttgctccattgtacgaaccacaccaaagaaagaacatcttttactctaactgtggtattgttgctatgggctctattttgacctatttgtccatggttttctctccattaactgttttcatgtactacggtatcccatacttgggtgttaatgcttggattgtttgcattacttacttacaacacactgatccaaaggttcctcacttcagagacaacgaatggaattttcaaagaggtgccgcttgtaccatcgatagatccttcggtactattgtcaaccacttgcaccaccacatcggcgattcccaccaatgtcaccacatgttctctcaaatgccattctacaatgctgtcgaagctactaagtatctaaaggccaagctaggtaagtactacatcttcgacgacactccaattgccaaggctttgtacagaaactggagagaatgtaaattcgtcgaagacgaaggtgatgttgttttctacaagcactaa

SEQ ID NO: 393 - DNA, 1212 bp, Artificial sequence
  Delta-15 Desaturase
atggcccctccacacgtcgtcgacgaacaagttagaagaagaatcgttgttgaagacgagattaagtcaaagaaacaattcgagagaaactacgtcccaatggatttcactatcaaggaaatcagagacgctatccctgctcacttattcatcagagacacaactaagtcaattctacacgttgtcaaagatttggttaccattgccattgttttctactgtgctaccttcatcgaaactttgccatccttggctttgagagttccagcatggatcacctactggattattcaaggtaccgtcatggttggtccatggattttggctcacgaatgtggtcacggtgccttttctaaacacaggaggatcaacaccattatcggttgggtcttgcattccgctttgttggttccttatcaggcattggcaatgtcacactctaagcaccacaagggtactggttccatggagaaggatttggtcttcattccagctactcgttcctacaaaggtctacctgcccgatatattcttgacatgaatgatgaagtttctgaacaagaacatcaccaccatgaagaatccatctttgctgaaaccccaatctacactttgggtgccttgttgttcgttttaaccttcggttggccattgtacctaattgttaacttctctggtcacgaagccccacactgggtcaaccacttccaaactgttgctccattgtacgaaccacaccaaagaaagaacatcttttactctaactgtggtattgttgctatgggctctattttgacctatttgtccatggttttctctccattaactgttttcatgtactacggtatcccatacttgggtgttaatgcttggattgtttgcattacttacttacaacacactgatccaaaggttcctcacttcagagacaacgaatggaattttcaaagaggtgccgcttgtaccatcgatagatccttcggtactattgtcaaccacttgcaccaccacatcggcgattcccaccaatgtcaccacatgttctctcaaatgccattctacaatgctgtcgaagctactaagtatctaaaggccaagctaggtaagtactacatcttcgacgacactccaattgccaaggctttgtacagaaactggagagaatgtaaattcgtcgaagacgaaggtgatgttgttttctacaagcactaa

SEQ ID NO: 394 - DNA, 1212 bp, Artificial sequence
  Delta-15 Desaturase
atggcccctccacacgtcgtcgacgaacaagttagaagaagaatcgttgttgaagacgagattaagtcaaagaaacaattcgagagaaactacgtcccaatggatttcactatcaaggaaatcagagacgctatccctgctcacttattcatcagagacacaactaagtcaattctacacgttgtcaaagatttggttaccattgccattgttttctactgtgctaccttcatcgaaactttgccatccttggctttgagagttccagcatggatcacctactggattattcaaggtaccgtcatggttggtccatggattttggctcacgaatgtggtcacggtgccttttctaaacacaggaggatcaacaccattatcggttgggtcttgcattccgctttgttggttccttatcaggcattggcaatgtcacactctaagcaccacaagggtactggttccatggagaaggatttggtcttcattccagctactcgttcctacaaaggtctacctgccctagattttcctgccaggcagaaagaagtttctgaacaagaacatcaccaccatgaagaatccatctttgctgaaaccccaatctacactttgggtgccttgttgttcgttttaaccttcggttggccattgtacctaattgttaacttctctggtcacgaagccccacactgggtcaaccacttccaaactgttgctccattgtacgaaccacaccaaagaaagaacatcttttactctaactgtggtattgttgctatgggctctattttgacctatttgtccatggttttctctccattaactgttttcatgtactacggtatcccatacttgggtgttaatgcttggattgtttgcattacttacttacaacacactgatccaaaggttcctcacttcagagacaacgaatggaattttcaaagaggtgccgcttgtaccatcgatagatccttcggtactattgtcaaccacttgcaccaccacatcggcgattcccaccaatgtcaccacatgttctctcaaatgccattctacaatgctgtcgaagctactaagtatctaaaggccaagctaggtaagtactacatcttcgacgacactccaattgccaaggctttgtacagaaactggagagaatgtaaattcgtcgaagacgaaggtgatgttgttttctacaagcactaa

SEQ ID NO: 395 - DNA, 1212 bp, Artificial sequence
  Delta-15 Desaturase
atggcccctccacacgtcgtcgacgaacaagttagaagaagaatcgttgttgaagacgagattaagtcaaagaaacaattcgagagaaactacgtcccaatggatttcactatcaaggaaatcagagacgctatccctgctcacttattcatcagagacacaactaagtcaattctacacgttgtcaaagatttggttaccattgccattgttttctactgtgctaccttcatcgaaactttgccatccttggctttgagagttccagcatggatcacctactggattattcaaggtaccgtcatggttggtccatggattttggctcacgaatgtggtcacggtgccttttctaaacacaggaggatcaacaccattatcggttgggtcttgcattccgctttgttggttccttatcaggcattggcaatgtcacactctaagcaccacaagggtactggttccatggagaaggatttggtcttcattccagctactcgttcctacaaaggtctacctgcccgaaattttcttgacatggagaatgaagtttctgaacaagaacatcaccaccatgaagaatccatctttgctgaaaccccaatctacactttgggtgccttgttgttcgttttaaccttcggttggccattgtacctaattgttaacttctctggtcacgaagccccacactgggtcaaccacttccaaactgttgctccattgtacgaaccacaccaaagaaagaacatcttttactctaactgtggtattgttgctatgggctctattttgacctatttgtccatggttttctctccattaactgttttcatgtactacggtatcccatacttgggtgttaatgcttggattgtttgcattacttacttacaacacactgatccaaaggttcctcacttcagagacaacgaatggaattttcaaagaggtgccgcttgtaccatcgatagatccttcggtactattgtcaaccacttgcaccaccacatcggcgattcccaccaatgtcaccacatgttctctcaaatgccattctacaatgctgtcgaagctactaagtatctaaaggccaagctaggtaagtactacatcttcgacgacactccaattgccaaggctttgtacagaaactggagagaatgtaaattcgtcgaagacgaaggtgatgttgttttctacaagcactaa

SEQ ID NO: 396 - DNA, 1212 bp, Artificial sequence
  Delta-15 Desaturase
atggcccctccacacgtcgtcgacgaacaagttagaagaagaatcgttgttgaagacgagattaagtcaaagaaacaattcgagagaaactacgtcccaatggatttcactatcaaggaaatcagagacgctatccctgctcacttattcatcagagacacaactaagtcaattctacacgttgtcaaagatttggttaccattgccattgttttctactgtgctaccttcatcgaaactttgccatccttggctttgagagttccagcatggatcacctactggattattcaaggtaccgtcatggttggtccatggattttggctcacgaatgtggtcacggtgccttttctaaacacaggaggatcaacaccattatcggttgggtcttgcattccgctttgttggttccttatcaggcattggcaatgtcacactctaagcaccacaagggtactggttccatggagaaggatttggtcttcattccagctactcgttcctacaaaggtctacctgccctagctgttcctgacaggcagaaagaagtttctgaacaagaacatcaccaccatgaagaatccatctttgctgaaaccccaatctacactttgggtgccttgttgttcgttttaaccttcggttggccattgtacctaattgttaacttctctggtcacgaagccccacactgggtcaaccacttccaaactgttgctccattgtacgaaccacaccaaagaaagaacatcttttactctaactgtggtattgttgctatgggctctattttgacctatttgtccatggttttctctccattaactgttttcatgtactacggtatcccatacttgggtgttaatgcttggattgtttgcattacttacttacaacacactgatccaaaggttcctcacttcagagacaacgaatggaattttcaaagaggtgccgcttgtaccatcgatagatccttcggtactattgtcaaccacttgcaccaccacatcggcgattcccaccaatgtcaccacatgttctctcaaatgccattctacaatgctgtcgaagctactaagtatctaaaggccaagctaggtaagtactacatcttcgacgacactccaattgccaaggctttgtacagaaactggagagaatgtaaattcgtcgaagacgaaggtgatgttgttttctacaagcactaa

SEQ ID NO: 397 - DNA, 1212 bp, Artificial sequence
  Delta-15 Desaturase
atggcccctccacacgtcgtcgacgaacaagttagaagaagaatcgttgttgaagacgagattaagtcaaagaaacaattcgagagaaactacgtcccaatggatttcactatcaaggaaatcagagacgctatccctgctcacttattcatcagagacacaactaagtcaattctacacgttgtcaaagatttggttaccattgccattgttttctactgtgctaccttcatcgaaactttgccatccttggctttgagagttccagcatggatcacctactggattattcaaggtaccgtcatggttggtccatggattttggctcacgaatgtggtcacggtgccttttctaaacacaggaggatcaacaccattatcggttgggtcttgcattccgctttgttggttccttatcaggcattggcaatgtcacactctaagcaccacaagggtactggttccatggagaaggatttggtcttcattccagctactcgttcctacaaaggtctacctgccgtaaatttttctgccgggcatgatgaagtttctgaacaagaacatcaccaccatgaagaatccatctttgctgaaaccccaatctacactttgggtgccttgttgttcgttttaaccttcggttggccattgtacctaattgttaacttctctggtcacgaagccccacactgggtcaaccacttccaaactgttgctccattgtacgaaccacaccaaagaaagaacatcttttactctaactgtggtattgttgctatgggctctattttgacctatttgtccatggttttctctccattaactgttttcatgtactacggtatcccatacttgggtgttaatgcttggattgtttgcattacttacttacaacacactgatccaaaggttcctcacttcagagacaacgaatggaattttcaaagaggtgccgcttgtaccatcgatagatccttcggtactattgtcaaccacttgcaccaccacatcggcgattcccaccaatgtcaccacatgttctctcaaatgccattctacaatgctgtcgaagctactaagtatctaaaggccaagctaggtaagtactacatcttcgacgacactccaattgccaaggctttgtacagaaactggagagaatgtaaattcgtcgaagacgaaggtgatgttgttttctacaagcactaa

SEQ ID NO: 398 - DNA, 1212 bp, Artificial sequence
  Delta-15 Desaturase
atggcccctccacacgtcgtcgacgaacaagttagaagaagaatcgttgttgaagacgagattaagtcaaagaaacaattcgagagaaactacgtcccaatggatttcactatcaaggaaatcagagacgctatccctgctcacttattcatcagagacacaactaagtcaattctacacgttgtcaaagatttggttaccattgccattgttttctactgtgctaccttcatcgaaactttgccatccttggctttgagagttccagcatggatcacctactggattattcaaggtaccgtcatggttggtccatggattttggctcacgaatgtggtcacggtgccttttctaaacacaggaggatcaacaccattatcggttgggtcttgcattccgctttgttggttccttatcaggcattggcaatgtcacactctaagcaccacaagggtactggttccatggagaaggatttggtcttcattccagctactcgttcctacaaaggtctacctgccgtaactaatcttgccttgcatgaagaagtttctgaacaagaacatcaccaccatgaagaatccatctttgctgaaaccccaatctacactttgggtgccttgttgttcgttttaaccttcggttggccattgtacctaattgttaacttctctggtcacgaagccccacactgggtcaaccacttccaaactgttgctccattgtacgaaccacaccaaagaaagaacatcttttactctaactgtggtattgttgctatgggctctattttgacctatttgtccatggttttctctccattaactgttttcatgtactacggtatcccatacttgggtgttaatgcttggattgtttgcattacttacttacaacacactgatccaaaggttcctcacttcagagacaacgaatggaattttcaaagaggtgccgcttgtaccatcgatagatccttcggtactattgtcaaccacttgcaccaccacatcggcgattcccaccaatgtcaccacatgttctctcaaatgccattctacaatgctgtcgaagctactaagtatctaaaggccaagctaggtaagtactacatcttcgacgacactccaattgccaaggctttgtacagaaactggagagaatgtaaattcgtcgaagacgaaggtgatgttgttttctacaagcactaa

SEQ ID NO: 399 - DNA, 1212 bp, Artificial sequence
  Delta-15 Desaturase
atggcccctccacacgtcgtcgacgaacaagttagaagaagaatcgttgttgaagacgagattaagtcaaagaaacaattcgagagaaactacgtcccaatggatttcactatcaaggaaatcagagacgctatccctgctcacttattcatcagagacacaactaagtcaattctacacgttgtcaaagatttggttaccattgccattgttttctactgtgctaccttcatcgaaactttgccatccttggctttgagagttccagcatggatcacctactggattattcaaggtaccgtcatggttggtccatggattttggctcacgaatgtggtcacggtgccttttctaaacacaggaggatcaacaccattatcggttgggtcttgcattccgctttgttggttccttatcaggcattggcaatgtcacactctaagcaccacaagggtactggttccatggagaaggatttggtcttcattccagctactcgttcctacaaaggtctacctgcccgagctgatgctgacggggaggaagaagtttctgaacaagaacatcaccaccatgaagaatccatctttgctgaaaccccaatctacactttgggtgccttgttgttcgttttaaccttcggttggccattgtacctaattgttaacttctctggtcacgaagccccacactgggtcaaccacttccaaactgttgctccattgtacgaaccacaccaaagaaagaacatcttttactctaactgtggtattgttgctatgggctctattttgacctatttgtccatggttttctctccattaactgttttcatgtactacggtatcccatacttgggtgttaatgcttggattgtttgcattacttacttacaacacactgatccaaaggttcctcacttcagagacaacgaatggaattttcaaagaggtgccgcttgtaccatcgatagatccttcggtactattgtcaaccacttgcaccaccacatcggcgattcccaccaatgtcaccacatgttctctcaaatgccattctacaatgctgtcgaagctactaagtatctaaaggccaagctaggtaagtactacatcttcgacgacactccaattgccaaggctttgtacagaaactggagagaatgtaaattcgtcgaagacgaaggtgatgttgttttctacaagcactaa

SEQ ID NO: 400 - DNA, 1212 bp, Artificial sequence
  Delta-15 Desaturase
atggcccctccacacgtcgtcgacgaacaagttagaagaagaatcgttgttgaagacgagattaagtcaaagaaacaattcgagagaaactacgtcccaatggatttcactatcaaggaaatcagagacgctatccctgctcacttattcatcagagacacaactaagtcaattctacacgttgtcaaagatttggttaccattgccattgttttctactgtgctaccttcatcgaaactttgccatccttggctttgagagttccagcatggatcacctactggattattcaaggtaccgtcatggttggtccatggattttggctcacgaatgtggtcacggtgccttttctaaacacaggaggatcaacaccattatcggttgggtcttgcattccgctttgttggttccttatcaggcattggcaatgtcacactctaagcaccacaagggtactggttccatggagaaggatttggtcttcattccagctactcgttcctacaaaggtctacctgccctatcttttcttgccatgcatgatgaagtttctgaacaagaacatcaccaccatgaagaatccatctttgctgaaaccccaatctacactttgggtgccttgttgttcgttttaaccttcggttggccattgtacctaattgttaacttctctggtcacgaagccccacactgggtcaaccacttccaaactgttgctccattgtacgaaccacaccaaagaaagaacatcttttactctaactgtggtattgttgctatgggctctattttgacctatttgtccatggttttctctccattaactgttttcatgtactacggtatcccatacttgggtgttaatgcttggattgtttgcattacttacttacaacacactgatccaaaggttcctcacttcagagacaacgaatggaattttcaaagaggtgccgcttgtaccatcgatagatccttcggtactattgtcaaccacttgcaccaccacatcggcgattcccaccaatgtcaccacatgttctctcaaatgccattctacaatgctgtcgaagctactaagtatctaaaggccaagctaggtaagtactacatcttcgacgacactccaattgccaaggctttgtacagaaactggagagaatgtaaattcgtcgaagacgaaggtgatgttgttttctacaagcactaa

SEQ ID NO: 401 - DNA, 1212 bp, Artificial sequence
  Delta-15 Desaturase
atggcccctccacacgtcgtcgacgaacaagttagaagaagaatcgttgttgaagacgagattaagtcaaagaaacaattcgagagaaactacgtcccaatggatttcactatcaaggaaatcagagacgctatccctgctcacttattcatcagagacacaactaagtcaattctacacgttgtcaaagatttggttaccattgccattgttttctactgtgctaccttcatcgaaactttgccatccttggctttgagagttccagcatggatcacctactggattattcaaggtaccgtcatggttggtccatggattttggctcacgaatgtggtcacggtgccttttctaaacacaggaggatcaacaccattatcggttgggtcttgcattccgctttgttggttccttatcaggcattggcaatgtcacactctaagcaccacaagggtactggttccatggagaaggatttggtcttcattccagctactcgttcctacaaaggtctacctgccggatctgatgtttccgtgaaggaagaagtttctgaacaagaacatcaccaccatgaagaatccatctttgctgaaaccccaatctacactttgggtgccttgttgttcgttttaaccttcggttggccattgtacctaattgttaacttctctggtcacgaagccccacactgggtcaaccacttccaaactgttgctccattgtacgaaccacaccaaagaaagaacatcttttactctaactgtggtattgttgctatgggctctattttgacctatttgtccatggttttctctccattaactgttttcatgtactacggtatcccatacttgggtgttaatgcttggattgtttgcattacttacttacaacacactgatccaaaggttcctcacttcagagacaacgaatggaattttcaaagaggtgccgcttgtaccatcgatagatccttcggtactattgtcaaccacttgcaccaccacatcggcgattcccaccaatgtcaccacatgttctctcaaatgccattctacaatgctgtcgaagctactaagtatctaaaggccaagctaggtaagtactacatcttcgacgacactccaattgccaaggctttgtacagaaactggagagaatgtaaattcgtcgaagacgaaggtgatgttgttttctacaagcactaa

SEQ ID NO: 402 - DNA, 1212 bp, Artificial sequence
  Delta-15 Desaturase
atggcccctccacacgtcgtcgacgaacaagttagaagaagaatcgttgttgaagacgagattaagtcaaagaaacaattcgagagaaactacgtcccaatggatttcactatcaaggaaatcagagacgctatccctgctcacttattcatcagagacacaactaagtcaattctacacgttgtcaaagatttggttaccattgccattgttttctactgtgctaccttcatcgaaactttgccatccttggctttgagagttccagcatggatcacctactggattattcaaggtaccgtcatggttggtccatggattttggctcacgaatgtggtcacggtgccttttctaaacacaggaggatcaacaccattatcggttgggtcttgcattccgctttgttggttccttatcaggcattggcaatgtcacactctaagcaccacaagggtactggttccatggagaaggatttggtcttcattccagctactcgttcctacaaaggtctacctgcccgatatattctttccatgaataatgaagtttctgaacaagaacatcaccaccatgaagaatccatctttgctgaaaccccaatctacactttgggtgccttgttgttcgttttaaccttcggttggccattgtacctaattgttaacttctctggtcacgaagccccacactgggtcaaccacttccaaactgttgctccattgtacgaaccacaccaaagaaagaacatcttttactctaactgtggtattgttgctatgggctctattttgacctatttgtccatggttttctctccattaactgttttcatgtactacggtatcccatacttgggtgttaatgcttggattgtttgcattacttacttacaacacactgatccaaaggttcctcacttcagagacaacgaatggaattttcaaagaggtgccgcttgtaccatcgatagatccttcggtactattgtcaaccacttgcaccaccacatcggcgattcccaccaatgtcaccacatgttctctcaaatgccattctacaatgctgtcgaagctactaagtatctaaaggccaagctaggtaagtactacatcttcgacgacactccaattgccaaggctttgtacagaaactggagagaatgtaaattcgtcgaagacgaaggtgatgttgttttctacaagcactaa

SEQ ID NO: 403 - DNA, 1212 bp, Artificial sequence
  Delta-15 Desaturase
atggcccctccacacgtcgtcgacgaacaagttagaagaagaatcgttgttgaagacgagattaagtcaaagaaacaattcgagagaaactacgtcccaatggatttcactatcaaggaaatcagagacgctatccctgctcacttattcatcagagacacaactaagtcaattctacacgttgtcaaagatttggttaccattgccattgttttctactgtgctaccttcatcgaaactttgccatccttggctttgagagttccagcatggatcacctactggattattcaaggtaccgtcatggttggtccatggattttggctcacgaatgtggtcacggtgccttttctaaacacaggaggatcaacaccattatcggttgggtcttgcattccgctttgttggttccttatcaggcattggcaatgtcacactctaagcaccacaagggtactggttccatggagaaggatttggtcttcattccagctactcgttcctacaaaggtctacctgccggagatgatctttcctggaaggaagaagtttctgaacaagaacatcaccaccatgaagaatccatctttgctgaaaccccaatctacactttgggtgccttgttgttcgttttaaccttcggttggccattgtacctaattgttaacttctctggtcacgaagccccacactgggtcaaccacttccaaactgttgctccattgtacgaaccacaccaaagaaagaacatcttttactctaactgtggtattgttgctatgggctctattttgacctatttgtccatggttttctctccattaactgttttcatgtactacggtatcccatacttgggtgttaatgcttggattgtttgcattacttacttacaacacactgatccaaaggttcctcacttcagagacaacgaatggaattttcaaagaggtgccgcttgtaccatcgatagatccttcggtactattgtcaaccacttgcaccaccacatcggcgattcccaccaatgtcaccacatgttctctcaaatgccattctacaatgctgtcgaagctactaagtatctaaaggccaagctaggtaagtactacatcttcgacgacactccaattgccaaggctttgtacagaaactggagagaatgtaaattcgtcgaagacgaaggtgatgttgttttctacaagcactaa

SEQ ID NO: 404 - DNA, 1212 bp, Artificial sequence
  Delta-15 Desaturase
atggcccctccacacgtcgtcgacgaacaagttagaagaagaatcgttgttgaagacgagattaagtcaaagaaacaattcgagagaaactacgtcccaatggatttcactatcaaggaaatcagagacgctatccctgctcacttattcatcagagacacaactaagtcaattctacacgttgtcaaagatttggttaccattgccattgttttctactgtgctaccttcatcgaaactttgccatccttggctttgagagttccagcatggatcacctactggattattcaaggtaccgtcatggttggtccatggattttggctcacgaatgtggtcacggtgccttttctaaacacaggaggatcaacaccattatcggttgggtcttgcattccgctttgttggttccttatcaggcattggcaatgtcacactctaagcaccacaagggtactggttccatggagaaggatttggtcttcattccagctactcgttcctacaaaggtctacctgccctatatgatccttccaggcagaaagaagtttctgaacaagaacatcaccaccatgaagaatccatctttgctgaaaccccaatctacactttgggtgccttgttgttcgttttaaccttcggttggccattgtacctaattgttaacttctctggtcacgaagccccacactgggtcaaccacttccaaactgttgctccattgtacgaaccacaccaaagaaagaacatcttttactctaactgtggtattgttgctatgggctctattttgacctatttgtccatggttttctctccattaactgttttcatgtactacggtatcccatacttgggtgttaatgcttggattgtttgcattacttacttacaacacactgatccaaaggttcctcacttcagagacaacgaatggaattttcaaagaggtgccgcttgtaccatcgatagatccttcggtactattgtcaaccacttgcaccaccacatcggcgattcccaccaatgtcaccacatgttctctcaaatgccattctacaatgctgtcgaagctactaagtatctaaaggccaagctaggtaagtactacatcttcgacgacactccaattgccaaggctttgtacagaaactggagagaatgtaaattcgtcgaagacgaaggtgatgttgttttctacaagcactaa

SEQ ID NO: 405 - DNA, 1212 bp, Artificial sequence
  Delta-15 Desaturase
atggcccctccacacgtcgtcgacgaacaagttagaagaagaatcgttgttgaagacgagattaagtcaaagaaacaattcgagagaaactacgtcccaatggatttcactatcaaggaaatcagagacgctatccctgctcacttattcatcagagacacaactaagtcaattctacacgttgtcaaagatttggttaccattgccattgttttctactgtgctaccttcatcgaaactttgccatccttggctttgagagttccagcatggatcacctactggattattcaaggtaccgtcatggttggtccatggattttggctcacgaatgtggtcacggtgccttttctaaacacaggaggatcaacaccattatcggttgggtcttgcattccgctttgttggttccttatcaggcattggcaatgtcacactctaagcaccacaagggtactggttccatggagaaggatttggtcttcattccagctactcgttcctacaaaggtctacctgcccgatattttgcttccatgcatgaagaagtttctgaacaagaacatcaccaccatgaagaatccatctttgctgaaaccccaatctacactttgggtgccttgttgttcgttttaaccttcggttggccattgtacctaattgttaacttctctggtcacgaagccccacactgggtcaaccacttccaaactgttgctccattgtacgaaccacaccaaagaaagaacatcttttactctaactgtggtattgttgctatgggctctattttgacctatttgtccatggttttctctccattaactgttttcatgtactacggtatcccatacttgggtgttaatgcttggattgtttgcattacttacttacaacacactgatccaaaggttcctcacttcagagacaacgaatggaattttcaaagaggtgccgcttgtaccatcgatagatccttcggtactattgtcaaccacttgcaccaccacatcggcgattcccaccaatgtcaccacatgttctctcaaatgccattctacaatgctgtcgaagctactaagtatctaaaggccaagctaggtaagtactacatcttcgacgacactccaattgccaaggctttgtacagaaactggagagaatgtaaattcgtcgaagacgaaggtgatgttgttttctacaagcactaa

SEQ ID NO: 406 - DNA, 1212 bp, Artificial sequence
  Delta-15 Desaturase
atggcccctccacacgtcgtcgacgaacaagttagaagaagaatcgttgttgaagacgagattaagtcaaagaaacaattcgagagaaactacgtcccaatggatttcactatcaaggaaatcagagacgctatccctgctcacttattcatcagagacacaactaagtcaattctacacgttgtcaaagatttggttaccattgccattgttttctactgtgctaccttcatcgaaactttgccatccttggctttgagagttccagcatggatcacctactggattattcaaggtaccgtcatggttggtccatggattttggctcacgaatgtggtcacggtgccttttctaaacacaggaggatcaacaccattatcggttgggtcttgcattccgctttgttggttccttatcaggcattggcaatgtcacactctaagcaccacaagggtactggttccatggagaaggatttggtcttcattccagctactcgttcctacaaaggtctacctgccggaactaatcctgacatgcaggaagaagtttctgaacaagaacatcaccaccatgaagaatccatctttgctgaaaccccaatctacactttgggtgccttgttgttcgttttaaccttcggttggccattgtacctaattgttaacttctctggtcacgaagccccacactgggtcaaccacttccaaactgttgctccattgtacgaaccacaccaaagaaagaacatcttttactctaactgtggtattgttgctatgggctctattttgacctatttgtccatggttttctctccattaactgttttcatgtactacggtatcccatacttgggtgttaatgcttggattgtttgcattacttacttacaacacactgatccaaaggttcctcacttcagagacaacgaatggaattttcaaagaggtgccgcttgtaccatcgatagatccttcggtactattgtcaaccacttgcaccaccacatcggcgattcccaccaatgtcaccacatgttctctcaaatgccattctacaatgctgtcgaagctactaagtatctaaaggccaagctaggtaagtactacatcttcgacgacactccaattgccaaggctttgtacagaaactggagagaatgtaaattcgtcgaagacgaaggtgatgttgttttctacaagcactaa

SEQ ID NO: 407 - DNA, 1212 bp, Artificial sequence
  Delta-15 Desaturase
atggcccctccacacgtcgtcgacgaacaagttagaagaagaatcgttgttgaagacgagattaagtcaaagaaacaattcgagagaaactacgtcccaatggatttcactatcaaggaaatcagagacgctatccctgctcacttattcatcagagacacaactaagtcaattctacacgttgtcaaagatttggttaccattgccattgttttctactgtgctaccttcatcgaaactttgccatccttggctttgagagttccagcatggatcacctactggattattcaaggtaccgtcatggttggtccatggattttggctcacgaatgtggtcacggtgccttttctaaacacaggaggatcaacaccattatcggttgggtcttgcattccgctttgttggttccttatcaggcattggcaatgtcacactctaagcaccacaagggtactggttccatggagaaggatttggtcttcattccagctactcgttcctacaaaggtctacctgcccgatctaatcttgacttagagaatgaagtttctgaacaagaacatcaccaccatgaagaatccatctttgctgaaaccccaatctacactttgggtgccttgttgttcgttttaaccttcggttggccattgtacctaattgttaacttctctggtcacgaagccccacactgggtcaaccacttccaaactgttgctccattgtacgaaccacaccaaagaaagaacatcttttactctaactgtggtattgttgctatgggctctattttgacctatttgtccatggttttctctccattaactgttttcatgtactacggtatcccatacttgggtgttaatgcttggattgtttgcattacttacttacaacacactgatccaaaggttcctcacttcagagacaacgaatggaattttcaaagaggtgccgcttgtaccatcgatagatccttcggtactattgtcaaccacttgcaccaccacatcggcgattcccaccaatgtcaccacatgttctctcaaatgccattctacaatgctgtcgaagctactaagtatctaaaggccaagctaggtaagtactacatcttcgacgacactccaattgccaaggctttgtacagaaactggagagaatgtaaattcgtcgaagacgaaggtgatgttgttttctacaagcactaa

SEQ ID NO: 408 - DNA, 1212 bp, Artificial sequence
  Delta-15 Desaturase
atggcccctccacacgtcgtcgacgaacaagttagaagaagaatcgttgttgaaaacgagattaagtcaaagaaacaattcgagagaaactacgtcccaatggatttcactatcaaggaaatcagagacgctatccctgctcacttattcatcagagacacaactaagtcaattctacacgttgtcaaagatttggttaccattgccattgttttctactgtgctaccttcatcgaaactttgccatccttggctttgagagttccagcatggatcacctactggattattcaaggtaccgtcatggttggtccatggattttggctcacgaatgtggtcacggtgccttttctaaacacaggaggatcaacaccattatcggttgggtcttgcattccgctttgttggttccttatcaggcattggcaatgtcacactctaagcaccacaagggtactggttccatggagaaggatttggtcttcattccagctactcgttcctacaaaggtctacctgcccgatctgttcctgacttgcataatgaagtttctgaacaagaacatcaccaccatgaagaatccatctttgctgaaaccccaatctacactttgggtgccttgttgttcgttttaaccttcggttggccattgtacctaattgttaacttctctggtcacgaagccccacactgggtcaaccacttccaaactgttgctccattgtacgaaccacaccaaagaaagaacatcttttactctaactgtggtattgttgctatgggctctattttgacctatttgtccatggttttctctccattaactgttttcatgtactacggtatcccatacttgggtgttaatgcttggattgtttgcattacttacttacaacacactgatccaaaggttcctcacttcagagacaacgaatggaattttcaaagaggtgccgcttgtaccatcgatagatccttcggtactattgtcaaccacttgcaccaccacatcggcgattcccaccaatgtcaccacatgttctctcaaatgccattctacaatgctgtcgaagctactaagtatctaaaggccaagctaggtaagtactacatcttcgacgacactccaattgccaaggctttgtacagaaactggagagaatgtaaattcgtcgaagacgaaggtgatgttgttttctacaagcactaa

SEQ ID NO: 409 - DNA, 1212 bp, Artificial sequence
  Delta-15 Desaturase
atggcccctccacacgtcgtcgacgaacaagttagaagaagaatcgttgttgaagacgagattaagtcaaagaaacaattcgagagaaactacgtcccaatggatttcactatcaaggaaatcagagacgctatccctgctcacttattcatcagagacacaactaagtcaattctacacgttgtcaaagatttggttaccattgccattgttttctactgtgctaccttcatcgaaactttgccatccttggctttgagagttccagcatggatcacctactggattattcaaggtaccgtcatggttggtccatggattttggctcacgaatgtggtcacggtgccttttctaaacacaggaggatcaacaccattatcggttgggtcttgcattccgctttgttggttccttatcaggcattggcaatgtcacactctaagcaccacaagggtactggttccatggagaaggatttggtcttcattccagctactcgttcctacaaaggtctacctgccctaaattttccttacttggatgaagaagtttctgaacgagaacatcaccaccatgaagaatccatctttgctgaaaccccaatctacactttgggtgccttgttgttcgttttaaccttcggttggccattgtacctaattgttaacttctctggtcacgaagccccacactgggtcaaccacttccaaactgttgctccattatacgaaccacaccaaagaaagaacatcttttactctaactgtggtattgttgctatgggctctattttgacctatttgtccatggttttctctccattaactgttttcatgtactacggtatcccatacttgggtgttaatgcttggattgtttgcattacttacttacaacacactgatccaaaggttcctcacttcagagacaacgaatggaattttcaaagaggtgccgcttgtaccatcgatagatccttcggtactattgtcaaccacttgcaccaccacatcggcgattcccaccaatgtcaccacatgttctctcaaatgccattctacaatgctgtcgaagctactaagtatctaaaggccaagctaggtaagtactacatcttcgacgacactccaattgccaaggctttgtacagaaactggagagaatgtaaattcgtcgaagacgaaggtgatgttgttttctacaagcactaa

SEQ ID NO: 410 - DNA, 1212 bp, Artificial sequence
  Delta-15 Desaturase
atggcccctccacacgtcgtcgacgaacaagttagaagaagaatcgttgttgaagacgagattaagtcaaagaaacaattcgagagaaactacgtcccaatggatttcactatcaaggaaatcagagacgctatccctgctcacttattcatcagagacacaactaagtcaattctacacgttgtcaaagatttggttaccattgccattgttttctactgtgctaccttcatcgaaactttgccatccttggctttgagagttccagcatggatcacctactggattattcaaggtaccgtcatggttggtccatggattttggctcacgaatgtggtcacggtgccttttctaaacacaggaggatcaacaccattatcggttgggtcttgcattccgctttgttggttccttatcaggcattggcaatgtcacactctaagcaccacaagggtactggttccatggagaaggatttggtcttcattccagctactcgttcctacaaaggtctacctgcccgaaatattcttgccgtgaaggatgaagtttctgaacaagaacatcaccaccatgaagaatccatctttgctgaaaccccaatctacactttgggtgccttgttgttcgttttaaccttcggttggccattgtacctaattgttaacttctctggtcacgaagccccacactgggtcaaccacttccaaactgttgctccattgtacgaaccacaccaaagaaagaacatcttttactctaactgtggtattgttgctatgggctctattttgacctatttgtccatggttttctctccattaactgttttcatgtactacggtatcccatacttgggtgttaatgcttggattgtttgcattacttacttacaacacactgatccaaaggttcctcacttcagagacaacgaatggaattttcaaagaggtgccgcttgtaccatcgatagatccttcggtactattgtcaaccacttgcaccaccacatcggcgattcccaccaatgtcaccacatgttctctcaaatgccattctacaatgctgtcgaagctactaagtatctaaaggccaagctaggtaagtactacatcttcgacgacactccaattgccaaggctttgtacagaaactggagagaatgtaaattcgtcgaagacgaaggtgatgttgttttctacaagcactaa

SEQ ID NO: 411 - DNA, 1212 bp, Artificial sequence
  Delta-15 Desaturase
atggcccctccacacgtcgtcgacgaacaagttagaagaagaatcgttgttgaagacgagattaagtcaaagaaacaattcgagagaaactacgtcccaatggatttcactatcaaggaaatcagagacgctatccctgctcacttattcatcagagacacaactaagtcaattctacacgttgtcaaagatttggttaccattgccattgttttctactgtgctaccttcatcgaaactttgccatccttggctttgagagttccagcatggatcacctactggattattcaaggtaccgtcatggttggtccatggattttggctcacgaatgtggtcacggtgccttttctaaacacaggaggatcaacaccattatcggttgggtcttgcattccgctttgttggttccttatcaggcattggcaatgtcacactctaagcaccacaagggtactggttccatggagaaggatttggtcttcattccagctactcgttcctacaaaggtctacctgccgtatattttgttgacttggatgatgaagtttctgaacaagaacatcaccaccatgaagaatccatctttgctgaaaccccaatctacactttgggtgccttgttgttcgttttaaccttcggttggccattgtacctaattgttaacttctctggtcacgaagccccacactgggtcaaccacttccaaactgttgctccattgtacgaaccacaccaaagaaagaacatcttttactctaactgtggtattgttgctatgggctctattttgacctatttgtccatggttttctctccattaactgttttcatgtactacggtatcccatacttgggtgttaatgcttggattgtttgcattacttacttacaacacactgatccaaaggttcctcacttcagagacaacgaatggaattttcaaagaggtgccgcttgtaccatcgatagatccttcggtactattgtcaaccacttgcaccaccacatcggcgattcccaccaatgtcaccacatgttctctcaaatgccattctacaatgctgtcgaagctactaagtatctaaaggccaagctaggtaagtactacatcttcgacgacactccaattgccaaggctttgtacagaaactggagagaatgtaaattcgtcgaagacgaaggtgatgttgttttctacaagcactaa

SEQ ID NO: 412 - DNA, 1212 bp, Artificial sequence
  Delta-15 Desaturase
atggcccctccacacgtcgtcgacgaacaagttagaagaagaatcgttgttgaagacgagattaagtcaaagaaacaattcgagagaaactacgtcccaatggatttcactatcaaggaaatcagagacgctatccctgctcacttattcatcagagacacaactaagtcaattctacacgttgtcaaagatttggttaccattgccattgttttctactgtgctaccttcatcgaaactttgccatccttggctttgagagttccagcatggatcacctactggattattcaaggtaccgtcatggttggtccatggattttggctcacgaatgtggtcacggtgccttttctaaacacaggaggatcaacaccattatcggttgggtcttgcattccgctttgttggttccttatcaggcattggcaatgtcacactctaagcaccacaagggtactggttccatggagaaggatttggtcttcattccagctactcgttcctacaaaggtctacctgcccgatattttccttacgggaatgaagaagtttctgaacaagaacatcaccaccatgaagaatccatctttgctgaaaccccaatctacactttgggtgccttgttgttcgttttaaccttcggttggccattgtacctaattgttaacttctctggtcacgaagccccacactgggtcaaccacttccaaactgttgctccattgtacgaaccacaccaaagaaagaacatcttttactctaactgtggtattgttgctatgggctctattttgacctatttgtccatggttttctctccattaactgttttcatgtactacggtatcccatacttgggtgttaatgcttggattgtttgcattacttacttacaacacactgatccaaaggttcctcacttcagagacaacgaatggaattttcaaagaggtgccgcttgtaccatcgatagatccttcggtactattgtcaaccacttgcaccaccacatcggcgattcccaccaatgtcaccacatgttctctcaaatgccattctacaatgctgtcgaagctactaagtatctaaaggccaagctaggtaagtactacatcttcgacgacactccaattgccaaggctttgtacagaaactggagagaatgtaaattcgtcgaagacgaaggtgatgttgttttctacaagcactaa

SEQ ID NO: 413 - DNA, 1212 bp, Artificial sequence
  Delta-15 Desaturase
atggcccctccacacgtcgtcgacgaacaagttagaagaagaatcgttgttgaagacgagattaagtcaaagaaacaattcgagagaaactacgtcccaatggatttcactatcaaggaaatcagagacgctatccctgctcacttattcatcagagacacaactaagtcaattctacacgttgtcaaagatttggttaccattgccattgttttctactgtgctaccttcatcgaaactttgccatccttggctttgagagttccagcatggatcacctactggattattcaaggtaccgtcatggttggtccatggattttggctcacgaatgtggtcacggtgccttttctaaacacaggaggatcaacaccattatcggttgggtcttgcattccgctttgttggttccttatcaggcattggcaatgtcacactctaagcaccacaagggtactggttccatggagaaggatttggtcttcattccagctactcgttcctacaaaggtctacctgccctaaatgttctttacatgcataaagaagtttctgaacaagaacatcaccaccatgaagaatccatctttgctgaaaccccaatctacactttgggtgccttgttgttcgttttaaccttcggttggccattgtacctaattgttaacttctctggtcacgaagccccacactgggtcaaccacttccaaactgttgctccattgtacgaaccacaccaaagaaagaacatcttttactctaactgtggtattgttgctatgggctctattttgacctatttgtccatggttttctctccattaactgttttcatgtactacggtatcccatacttgggtgttaatgcttggattgtttgcattacttacttacaacacactgatccaaaggttcctcacttcagagacaacgaatggaattttcaaagaggtgccgcttgtaccatcgatagatccttcggtactattgtcaaccacttgcaccaccacatcggcgattcccaccaatgtcaccacatgttctctcaaatgccattctacaatgctgtcgaagctactaagtatctaaaggccaagctaggtaagtactacatcttcgacgacactccaattgccaaggctttgtacagaaactggagagaatgtaaattcgtcgaagacgaaggtgatgttgttttctacaagcactaa

SEQ ID NO: 414 - DNA, 1212 bp, Artificial sequence
  Delta-15 Desaturase
atggcccctccacacgtcgtcgacgaacaagttagaagaagaatcgttgttgaagacgagattaagtcaaagaaacaattcgagagaaactacgtcccaatggatttcactatcaaggaaatcagagacgctatccctgctcacttattcatcagagacacaactaagtcaattctacacgttgtcaaagatttggttaccattgccattgttttctactgtgctaccttcatcgaaactttgccatccttggctttgagagttccagcatggatcacctactggattattcaaggtaccgtcatggttggtccatggattttggctcacgaatgtggtcacggtgccttttctaaacacaggaggatcaacaccattatcggttgggtcttgcattccgctttgttggttccttatcaggcattggcaatgtcacactctaagcaccacaagggtactggttccatggagaaggatttggtcttcattccagctactcgttcctacaaaggtctacctgccctaaattatcttgcctggaaggaagaagtttctgaacaagaacatcaccaccatgaagaatccatctttgctgaaaccccaatctacactttgggtgccttgttgttcgttttaaccttcggttggccattgtacctaattgttaacttctctggtcacgaagccccacactgggtcaaccacttccaaactgttgctccattgtacgaaccacaccaaagaaagaacatcttttactctaactgtggtattgttgctatgggctctattttgacctatttgtccatggttttctctccattaactgttttcatgtactacggtatcccatacttgggtgttaatgcttggattgtttgcattacttacttacaacacactgatccaaaggttcctcacttcagagacaacgaatggaattttcaaagaggtgccgcttgtaccatcgatagatccttcggtactattgtcaaccacttgcaccaccacatcggcgattcccaccaatgtcaccacatgttctctcaaatgccattctacaatgctgtcgaagctactaagtatctaaaggccaagctaggtaagtactacatcttcgacgacactccaattgccaaggctttgtacagaaactggagagaatgtaaattcgtcgaagacgaaggtgatgttgttttctacaagcactaa

SEQ ID NO: 415 - DNA, 1212 bp, Artificial sequence
  Delta-15 Desaturase
atggcccctccacacgtcgtcgacgaacaagttagaagaagaatcgttgttgaagacgagattaagtcaaagaaacaattcgagagaaactacgtcccaatggatttcactatcaaggaaatcagagacgctatccctgctcacttattcatcagagacacaactaagtcaattctacacgttgtcaaagatttggttaccattgccattgttttctactgtgctaccttcatcgaaactttgccatccttggctttgagagttccagcatggatcacctactggattattcaaggtaccgtcatggttggtccatggattttggctcacgaatgtggtcacggtgccttttctaaacacaggaggatcaacaccattatcggttgggtcttgcattccgctttgttggttccttatcaggcattggcaatgtcacactctaagcaccacaagggtactggttccatggagaaggatttggtcttcattccagctactcgttcctacaaaggtctacctgcccgagattttctttccttgcatgaagaagttcctgaacaagaacatcaccaccatgaagaatccatctttgctgaaaccccaatctacactttgggtgccttgttgttcgttttaaccttcggttggccattgtacctaattgttaacttctctggtcacgaagccccacactgggtcaaccacttccaaactgttgctccattgtacgaaccacaccaaagaaagaacatcttttactctaactgtggtattgttgctatgggctctattttgacctatttgtccatggttttctctccattaactgttttcatgtactacggtatcccatacttgggtgttaatgcttggattgtttgcattacttacttacaacacactgatccaaaggttcctcacttcagagacaacgaatggaattttcaaagaggtgccgcttgtaccatcgatagatccttcggtactattgtcaaccacttgcaccaccacatcggcgattcccaccaatgtcaccacatgttctctcaaatgccattctacaatgctgtcgaagctactaagtatctaaaggccaagctaggtaagtactacatcttcgacgacactccaattgccaaggctttgtacagaaactggagagaatgtaaattcgtcgaagacgaaggtgatgttgttttctacaagcactaa

SEQ ID NO: 416 - DNA, 1212 bp, Artificial sequence
  Delta-15 Desaturase
atggcccctccacacgtcgtcgacgaacaagttagaagaagaatcgttgttgaagacgagattaagtcaaagaaacaattcgagagaaactacgtcccaatggatttcactatcaaggaaatcagagacgctatccctgctcacttattcatcagagacacaactaagtcaattctacacgttgtcaaagatttggttaccattgccattgttttctactgtgctaccttcatcgaaactttgccatccttggctttgagagttccagcatggatcacctactggattattcaaggtaccgtcatggttggtccatggattttggctcacgaatgtggtcacggtgccttttctaaacacaggaggatcaacaccattatcggttgggtcttgcattccgctttgttggttccttatcaggcattggcaatgtcacactctaagcaccacaagggtactggttccatggagaaggatttggtcttcattccagctactcgttcctacaaaggtctacctgccggatatgttgcttccatggataatgaagtttctgaacaagaacatcaccaccatgaagaatccatctttgctgaaaccccaatctacactttgggtgccttgttgttcgttttaaccttcggttggccattgtacctaattgttaacttctctggtcacgaagccccacactgggtcaaccacttccaaactgttgctccattgtacgaaccacaccaaagaaagaacatcttttactctaactgtggtattgttgctatgggctctattttgacctatttgtccatggttttctctccattaactgttttcatgtactacggtatcccatacttgggtgttaatgcttggattgtttgcattacttacttacaacacactgatccaaaggttcctcacttcagagacaacgaatggaattttcaaagaggtgccgcttgtaccatcgatagatccttcggtactattgtcaaccacttgcaccaccacatcggcgattcccaccaatgtcaccacatgttctctcaaatgccattctacaatgctgtcgaagctactaagtatctaaaggccaagctaggtaagtactacatcttcgacgacactccaattgccaaggctttgtacagaaactggagagaatgtaaattcgtcgaagacgaaggtgatgttgttttctacaagcactaa

SEQ ID NO: 417 - DNA, 1212 bp, Artificial sequence
  Delta-15 Desaturase
atggcccctccacacgtcgtcgacgaacaagttagaagaagaatcgttgttgaagacgagattaagtcaaagaaacaattcgagagaaactacgtcccaatggatttcactatcaaggaaatcagagacgctatccctgctcacttattcatcagagacacaactaagtcaattctacacgttgtcaaagatttggttaccattgccattgttttctactgtgctaccttcatcgaaactttgccatccttggctttgagagttccagcatggatcacctactggattattcaaggtaccgtcatggttggtccatggattttggctcacgaatgtggtcacggtgccttttctaaacacaggaggatcaacaccattatcggttgggtcttgcattccgctttgttggttccttatcaggcattggcaatgtcacactctaagcaccacaagggtactggttccatggagaaggatttggtcttcattccagctactcgttcctacaaaggtctacctgccctatatgttcctgacatgaagaaagaagtttctgaacaagaacatcaccaccatgaagaatccatctttgctgaaaccccaatctacactttgggtgccttgttgttcgttttaaccttcggttggccattgtacctaattgttaacttctctggtcacgaagccccacactgggtcaaccacttccaaactgttgctccattgtacgaaccacaccaaagaaagaacatcttttactctaactgtggtattgttgctatgggctctattttgacctatttgtccatggttttctctccattaactgttttcatgtactacggtatcccatacttgggtgttaatgcttggattgtttgcattacttacttacaacacactgatccaaaggttcctcacttcagagacaacgaatggaattttcaaagaggtgccgcttgtaccatcgatagatccttcggtactattgtcaaccacttgcaccaccacatcggcgattcccaccaatgtcaccacatgttctctcaaatgccattctacaatgctgtcgaagctactaagtatctaaaggccaagctaggtaagtactacatcttcgacgacactccaattgccaaggctttgtacagaaactggagagaatgtaaattcgtcgaagacgaaggtgatgttgttttctacaagcactaa

SEQ ID NO: 418 - DNA, 1212 bp, Artificial sequence
  Delta-15 Desaturase
atggcccctccacacgtcgtcgacgaacaagttagaagaagaatcgttgttgaagacgagattaagtcaaagaaacaattcgagagaaactacgtcccaatggatttcactatcaaggaaatcagagacgctatccctgctcacttattcatcagagacacaactaagtcaattctacacgttgtcaaagatttggttaccattgccattgttttctactgtgctaccttcatcgaaactttgccatccttggctttgagagttccagcatggatcacctactggattattcaaggtaccgtcatggttggtccatggattttggctcacgaatgtggtcacggtgccttttctaaacacaggaggatcaacaccattatcggttgggtcttgcattccgctttgttggttccttatcaggcattggcaatgtcacactctaagcaccacaagggtactggttccatggagaaggatttggtcttcattccagctactcgttcctacaaaggtctacctgccctaaattatccttccttggagaatgaagtgtcggaacaagaacatcaccaccatgaagaatccatctttgctgaaaccccaatctacactttgggtgccttgttgttcgttttaaccttcggttggccattgtacctaattgttaacttctctggtcacgaagccccacactgggtcaaccacttccaaactgttgctccattgtacgaaccacaccaaagaaagaacatcttttactctaactgtggtattgttgctatgggctctattttgacctatttgtccatggttttctctccattaactgttttcatgtactacggtatcccatacttgggtgttaatgcttggattgtttgcattacttacttacaacacactgatccaaaggttcctcacttcagagacaacgaatggaattttcaaagaggtgccgcttgtaccatcgatagatccttcggtactattgtcaaccacttgcaccaccacatcggcgattcccaccaatgtcaccacatgttctctcaaatgccattctacaatgctgtcgaagctactaagtatctaaaggccaagctaggtaagtactacatcttcgacgacactccaattgccaaggctttgtacagaaactggagagaatgtaaattcgtcgaagacgaaggtgatgttgttttctacaagcactaa

SEQ ID NO: 419 - DNA, 1212 bp, Artificial sequence
  Delta-15 Desaturase
atggcccctccacacgtcgtcgacgaacaagttagaagaagaatcgttgttgaagacgagattaagtcaaagaaacaattcgagagaaactacgtcccaatggatttcactatcaaggaaatcagagacgctatccctgctcacttattcatcagagacacaactaagtcaattctacacgttgtcaaagatttggttaccattgccattgttttctactgtgctaccttcatcgaaactttgccatccttggctttgagagttccagcatggatcacctactggattattcaaggtaccgtcatggttggtccatggattttggctcacgaatgtggtcacggtgccttttctaaacacaggaggatcaacaccattatcggttgggtcttgcattccgctttgttggttccttatcaggcattggcaatgtcacactctaagcaccacaagggtactggttccatggagaaggatttggtcttcattccagctactcgttcctacaaaggtctacctgcccgatattttgtttacgggaaggaagaagtttctgaacaagaacatcaccaccatgaagaatccatctttgctgaaaccccaatctacactttgggtgccttgttgttcgttttaaccttcggttggccattgtacctaattgttaacttctctggtcacgaagccccacactgggtcaaccacttccaaactgttgctccattgtacgaaccacaccaaagaaagaacatcttttactctaactgtggtattgttgctatgggctctattttgacctatttgtccatggttttctctccattaactgttttcatgtactacggtatcccatacttgggtgttaatgcttggattgtttgcattacttacttacaacacactgatccaaaggttcctcacttcagagacaacgaatggaattttcaaagaggtgccgcttgtaccatcgatagatccttcggtactattgtcaaccacttgcaccaccacatcggcgattcccaccaatgtcaccacatgttctctcaaatgccattctacaatgctgtcgaagctactaagtatctaaaggccaagctaggtaagtactacatcttcgacgacactccaattgccaaggctttgtacagaaactggagagaatgtaaattcgtcgaagacgaaggtgatgttgttttctacaagcactaa

SEQ ID NO: 420 - DNA, 1212 bp, Artificial sequence
  Delta-15 Desaturase
atggcccctccacacgtcgtcgacgaacaagttagaagaagaatcgttgttgaagacgagattaagtcaaagaaacaattcgagagaaactacgtcccaatggatttcactatcaaggaaatcagagacgctatccctgctcacttattcatcagagacacaactaagtcaattctacacgttgtcaaagatttggttaccattgccattgttttctactgtgctaccttcatcgaaactttgccatccttggctttgagagttccagcatggatcacctactggattattcaaggtaccgtcatggttggtccatggattttggctcacgaatgtggtcacggtgccttttctaaacacaggaggatcaacaccattatcggttgggtcttgcattccgctttgttggttccttatcaggcattggcaatgtcacactctaagcaccacaagggtactggttccatggagaaggatttggtcttcattccagctactcgttcctacaaaggtctacctgccggatataatgtttcctggcataaagaagtttctgaacaagaacatcaccaccatgaagaatccatctttgctgaaaccccaatctacactttgggtgccttgttgttcgttttaaccttcggttggccattgtacctaattgttaacttctctggtcacgaagccccacactgggtcaaccacttccaaactgttgctccattgtacgaaccacaccaaagaaagaacatcttttactctaactgtggtattgttgctatgggctctattttgacctatttgtccatggttttctctccattaactgttttcatgtactacggtatcccatacttgggtgttaatgcttggattgtttgcattacttacttacaacacactgatccaaaggttcctcacttcagagacaacgaatggaattttcaaagaggtgccgcttgtaccatcgatagatccttcggtactattgtcaaccacttgcaccaccacatcggcgattcccaccaatgtcaccacatgttctctcaaatgccattctacaatgctgtcgaagctactaagtatctaaaggccaagctaggtaagtactacatcttcgacgacactccaattgccaaggctttgtacagaaactggagagaatgtaaattcgtcgaagacgaaggtgatgttgttttctacaagcactaa

SEQ ID NO: 421 - DNA, 1212 bp, Artificial sequence
  Delta-15 Desaturase
atggcccctccacacgtcgtcgacgaacaagttagaagaagaatcgttgttgaagacgagattaagtcaaagaaacaattcgagagaaactacgtcccaatggatttcactatcaaggaaatcagagacgctatccctgctcacttattcatcagagacacaactaagtcaattctacacgttgtcaaagatttggttaccattgccattgttttctactgtgctaccttcatcgaaactttgccatccttggctttgagagttccagcatggatcacctactggattattcaaggtaccgtcatggttggtccatggattttggctcacgaatgtggtcacggtgccttttctaaacacaggaggatcaacaccattatcggttgggtcttgcattccgctttgttggttccttatcaggcattggcaatgtcacactctaagcaccacaagggtactggttccatggagaaggatttggtcttcattccagctactcgttcctacaaaggtctacctgcccgatatgatgtttccgtgcaggaagaagtttctgaacaagaacatcaccaccatgaagaatccatctttgctgaaaccccaatctacactttgggtgccttgttgttcgttttaaccttcggttggccattgtacctaattgttaacttctctggtcacgaagccccacactgggtcaaccacttccaaactgttgctccattgtacgaaccacaccaaagaaagaacatcttttactctaactgtggtattgttgctatgggctctattttgacctatttgtccatggttttctctccattaactgttttcatgtactacggtatcccatacttgggtgttaatgcttggattgtttgcattacttacttacaacacactgatccaaaggttcctcacttcagagacaacgaatggaattttcaaagaggtgccgcttgtaccatcgatagatccttcggtactattgtcaaccacttgcaccaccacatcggcgattcccaccaatgtcaccacatgttctctcaaatgccattctacaatgctgtcgaagctactaagtatctaaaggccaagctaggtaagtactacatcttcgacgacactccaattgccaaggctttgtacagaaactggagagaatgtaaattcgtcgaagacgaaggtgatgttgttttctacaagcactaa

SEQ ID NO: 422 - DNA, 1212 bp, Artificial sequence
  Delta-15 Desaturase
atggcccctccacacgtcgtcgacgaacaagttagaagaagaatcgttgttgaagacgagattaagtcaaagaaacaattcgagagaaactacgtcccaatggatttcactatcaaggaaatcagagacgctatccctgctcacttattcatcagagacacaactaagtcaattctacacgttgtcaaagatttggttaccattgccattgttttctactgtgctaccttcatcgaaactttgccatccttggctttgagagttccagcatggatcacctactggattattcaaggtaccgtcatggttggtccatggattttggctcacgaatgtggtcacggtgccttttctaaacacaggaggatcaacaccattatcggttgggtcttgcattccgctttgttggttccttatcaggcattggcaatgtcacactctaagcaccacaagggtactggttccatggagaaggatttggtcttcattccagctactcgttcctacaaaggtctacctgccgtatctattgctgccatgaataaagaagtttctgaacaagaacatcaccaccatgaagaatccatctttgctgaaaccccaatctacactttgggtgccttgttgttcgttttaaccttcggttggccattgtacctaattgttaacttctctggtcacgaagccccacactgggtcaaccacttccaaactgttgctccattgtacgaaccacaccaaagaaagaacatcttttactctaactgtggtattgttgctatgggctctattttgacctatttgtccatggttttctctccattaactgttttcatgtactacggtatcccatacttgggtgttaatgcttggattgtttgcattacttacttacaacacactgatccaaaggttcctcacttcagagacaacgaatggaattttcaaagaggtgccgcttgtaccatcgatagatccttcggtactattgtcaaccacttgcaccaccacatcggcgattcccaccaatgtcaccacatgttctctcaaatgccattctacaatgctgtcgaagctactaagtatctaaaggccaagctaggtaagtactacatcttcgacgacactccaattgccaaggctttgtacagaaactggagagaatgtaaattcgtcgaagacgaaggtgatgttgttttctacaagcactaa

SEQ ID NO: 423 - DNA, 1212 bp, Artificial sequence
  Delta-15 Desaturase
atggcccctccacacgtcgtcgacgaacaagttagaagaagaatcgttgttgaagacgagattaagtcaaagaaacaattcgagagaaactacgtcccaatggatttcactatcaaggaaatcagagacgctatccctgctcacttattcatcagagacacaactaagtcaattctacacgttgtcaaagatttggttaccattgccattgttttctactgtgctaccttcatcgaaactttgccatccttggctttgagagttccagcatggatcacctactggattattcaaggtaccgtcatggttggtccatggattttggctcacgaatgtggtcacggtgccttttctaaacacaggaggatcaacaccattatcggttgggtcttgcattccgctttgttggttccttatcaggcattggcaatgtcacactctaagcaccacaagggtactggttccatggagaaggatttggtcttcattccagctactcgttcctacaaaggtctacctgccctaacttttcctgccatgaataaagaagtttctgaacaagaacatcaccaccatgaagaatccatctttgctgaaaccccaatctacactttgggtgccttgttgttcgttttaaccttcggttggccattgtacctaattgttaacttctctggtcacgaagccccacactgggtcaaccacttccaaactgttgctccattgtacgaaccacaccaaagaaagaacatcttttactctaactgtggtattgttgctatgggctctattttgacctatttgtccatggttttctctccattaactgttttcatgtactacggtatcccatacttgggtgttaatgcttggattgtttgcattacttacttacaacacactgatccaaaggttcctcacttcagagacaacgaatggaattttcaaagaggtgccgcttgtaccatcgatagatccttcggtactattgtcaaccacttgcaccaccacatcggcgattcccaccaatgtcaccacatgttctctcaaatgccattctacaatgctgtcgaagctactaagtatctaaaggccaagctaggtaagtactacatcttcgacgacactccaattgccaaggctttgtacagaaactggagagaatgtaaattcgtcgaagacgaaggtgatgttgttttctacaagcactaa

SEQ ID NO: 424 - DNA, 1212 bp, Artificial sequence
  Delta-15 Desaturase
atggcccctccacacgtcgtcgacgaacaagttagaagaagaatcgttgttgaagacgagattaagtcaaagaaacaattcgagagaaactacgtcccaatggatttcactatcaaggaaatcagagacgctatccctgctcacttattcatcagagacacaactaagtcaattctacacgttgtcaaagatttggttaccattgccattgttttctactgtgctaccttcatcgaaactttgccatccttggctttgagagttccagcatggatcacctactggattattcaaggtaccgtcatggttggtccatggattttggctcacgaatgtggtcacggtgccttttctaaacacaggaggatcaacaccattatcggttgggtcttgcattccgctttgttggttccttatcaggcattggcaatgtcacactctaagcaccacaagggtactggttccatggagaaggatttggtcttcattccagctactcgttcctacaaaggtctacctgccctagcttttgctgccgggcaggatgaagtttctgaacaagaacatcaccaccatgaagaatccatctttgctgaaaccccaatctacactttgggtgtcttgttgttcgttttaaccttcggttggccattgtacctaattgttaacttctctggtcacgaagccccacactgggtcaaccacttccaaactgttgctccattgtacgaaccacaccaaagaaagaacatcttttactctaactgtggtattgttgctatgggctctattttgacctatttgtccatggttttatctccattaactgttttcatgtactacggtatcccatacttgggtgttaatgcttggattgtttgcattacttacttacaacacactgatccaaaggttcctcacttcagagacaacgaatggaattttcaaagaggtgccgcttgtaccatcgatagatccttcggtactattgtcaaccacttgcaccaccacatcggcgattcccaccaatgtcaccacatgttctctcaaatgccattctacaatgctgtcgaagctactaagtatctaaaggccaagctaggtaagtactacatcttcgacgacactccaattgccaaggctttgtacagaaactggagagaatgtaaattcgtcgaagacgaaggtgatgttgttttctacaagcactaa

SEQ ID NO: 425 - DNA, 1212 bp, Artificial sequence
  Delta-15 Desaturase
atggcccctccacacgtcgtcgacgaacaagttagaagaagaatcgttgttgaagacgagattaagtcaaagaaacaattcgagagaaactacgtcccaatggatttcactatcaaggaaatcagagacgctatccctgctcacttattcatcagagacacaactaagtcaattctacacgttgtcaaagatttggttaccattgccattgttttctactgtgctaccttcatcgaaactttgccatccttggctttgagagttccagcatggatcacctactggattattcaaggtaccgtcatggttggtccatggattttggctcacgaatgtggtcacggtgccttttctaaacacaggaggatcaacaccattatcggttgggtcttgcattccgctttgttggttccttatcaggcattggcaatgtcacactctaagcaccacaagggtactggttccatggagaaggatttggtcttcattccagctactcgttcctacaaaggtctacctgcccgatataatccttccatgaaggatgaagtttctgaacaagaacatcaccaccatgaagaatccatctttgctgaaaccccaatctacactttgggtgccttgttgttcgttttaaccttcggttggccattgtacctaattgttaacttctctggtcacgaagccccacactgggtcaaccacttccaaactgttgctccattgtacgaaccacaccaaagaaagaacatcttttactctaactgtggtattgttgctatgggctctattttgacctatttgtccatggttttctctccattaactgttttcatgtactacggtatcccatacttgggtgttaatgcttggattgtttgcattacttacttacaacacactgatccaaaggttcctcacttcagagacaacgaatggaattttcaaagaggtgccgcttgtaccatcgatagatccttcggtactattgtcaaccacttgcaccaccacatcggcgattcccaccaatgtcaccacatgttctctcaaatgccattctacaatgctgtcgaagctactaagtatctaaaggccaagctaggtaagtactacatcttcgacgacactccaattgccaaggctttgtacagaaactggagagaatgtaaattcgtcgaagacgaaggtgatgttgttttctacaagcactaa

SEQ ID NO: 426 - DNA, 1212 bp, Artificial sequence
  Delta-15 Desaturase
atggcccctccacacgtcgtcgacgaacaagttagaagaagaatcgttgttgaagacgagattaagtcaaagaaacaattcgagagaaactacgtcccaatggatttcactatcaaggaaatcagagacgctatccctgctcacttattcatcagagacacaactaagtcaattctacacgttgtcaaagatttggttaccattgccattgttttctactgtgctaccttcatcgaaactttgccatccttggctttgagagttccagcatggatcacctactggattattcaaggtaccgtcatggttggtccatggattttggctcacgaatgtggtcacggtgccttttctaaacacaggaggatcaacaccattatcggttgggtcttgcattccgctttgttggttccttatcaggcattggcaatgtcacactctaagcaccacaagggtactggttccatggagaaggatttggtcttcattccagctactcgttcctacaaaggtctacctgccgtatattttcctgacgtgaaggatgaagtttctgaacaagaacatcaccaccatgaagaatccatctttgctgaaaccccaatctacactttgggtgccttgttgttcgttttaaccttcggttggccattgtacctaattgttaacttctctggtcacgaagccccacactgggtcaaccacttccaaactgttgctccattgtacgaaccacaccaaagaaagaacatcttttactctaactgtggtattgttgctatgggctctattttgacctatttgtccatggttttctctccattaactgttttcatgtactacggtatcccatacttgggtgttaatgcttggattgtttgcattacttacttacaacacactgatccaaaggttcctcacttcagagacaacgaatggaattttcaaagaggtgccgcttgtaccatcgatagatccttcggtactattgtcaaccacttgcaccaccacatcggcgattcccaccaatgtcaccacatgttctctcaaatgccattctacaatgctgtcgaagctactaagtatctaaaggccaagctaggtaagtactacatcttcgacgacactccaattgccaaggctttgtacagaaactggagagaatgtaaattcgtcgaagacgaaggtgatgttgttttctacaagcactaa

SEQ ID NO: 427 - DNA, 1212 bp, Artificial sequence
  Delta-15 Desaturase
atggcccctccacacgtcgtcgacgaacaagttagaagaagaatcgttgttgaagacgagattaagtcaaagaaacaattcgagagaaactacgtcccaatggatttcactatcaaggaaatcagagacgctatccctgctcacttattcatcagagacacaactaagtcaattctacacgttgtcaaagatttggttaccattgccattgttttctactgtgctaccttcatcgaaactttgccatccttggctttgagagttccagcatggatcacctactggattattcaaggtaccgtcatggttggtccatggattttggctcacgaatgtggtcacggtgccttttctaaacacaggaggatcaacaccattatcggttgggtcttgcattccgctttgttggttccttatcaggcattggcaatgtcacactctaagcaccacaagggtactggttccatggagaaggatttggtcttcattccagctactcgttcctacaaaggtctacctgcccgatatgatctttccgtgaaggatgaagtttctgaacaagaacatcaccaccatgaagaatccatctttgctgaaaccccaatctacactttgggtgccttgttgttcgttttaaccttcggttggccattgtacctaattgttaacttctctggtcacgaagccccacactgggtcaaccacttccaaactgttgctccattgtacgaaccacaccaaagaaagaacatcttttactctaactgtggtattgttgctatgggctctattttgacctatttgtccatggttttctctccattaactgttttcatgtactacggtatcccatacttgggtgttaatgcttggattgtttgcattacttacttacaacacactgatccaaaggttcctcacttcagagacaacgaatggaattttcaaagaggtgccgcttgtaccatcgatagatccttcggtactattgtcaaccacttgcaccaccacatcggcgattcccaccaatgtcaccacatgttctctcaaatgccattctacaatgctgtcgaagctactaagtatctaaaggccaagctaggtaagtactacatcttcgacgacactccaattgccaaggctttgtacagaaactggagagaatgtaaattcgtcgaagacgaaggtgatgttgttttctacaagcactaa

SEQ ID NO: 428 - DNA, 1212 bp, Artificial sequence
  Delta-15 Desaturase
atggcccctccacacgtcgtcgacgaacaagttagaagaagaatcgttgttgaagacgagattaagtcaaagaaacaattcgagagaaactacgtcccaatggatttcactatcaaggaaatcagagacgctatccctgctcacttattcatcagagacacaactaagtcaattctacacgttgtcaaagatttggttaccattgccattgttttctactgtgctaccttcatcgaaactttgccatccttggctttgagagttccagcatggatcacctactggattattcaaggtaccgtcatggttggtccatggattttggctcacgaatgtggtcacggtgccttttctaaacacaggaggatcaacaccattatcggttgggtcttgcattccgctttgttggttccttatcaggcattggcaatgtcacactctaagcaccacaagggtactggttccatggagaaggatttggtcttcattccagctactcgttcctacaaaggtctacctgcccgagattatcttgccatgcataaagaagtttctgaacaagaacatcaccaccatgaagaatccatctttgctgaaaccccaatctacactttgggtgccttgttgttcgttttaaccttcggttggccattgtacctaattgttaacttctctggtcacgaagccccacactgggtcaaccacttccaaactgttgctccattgtacgaaccacaccaaagaaagaacatcttttactctaactgtggtattgttgctatgggctctattttgacctatttgtccatggttttctctccattaactgttttcatgtactacggtatcccatacttgggtgttaatgcttggattgtttgcattacttacttacaacacactgatccaaaggttcctcacttcagagacaacgaatggaattttcaaagaggtgccgcttgtaccatcgatagatccttcggtactattgtcaaccacttgcaccaccacatcggcgattcccaccaatgtcaccacatgttctctcaaatgccattctacaatgctgtcgaagctactaagtatctaaaggccaagctaggtaagtactacatcttcgacgacactccaattgccaaggctttgtacagaaactggagagaatgtaaattcgtcgaagacgaaggtgatgttgttttctacaagcactaa

SEQ ID NO: 429 - DNA, 1212 bp, Artificial sequence
  Delta-15 Desaturase
atggcccctccacacgtcgtcgacgaacaagttagaagaagaatcgttgttgaagacgagattaagtcaaagaaacaattcgagagaaactacgtcccaatggatttcactatcaaggaaatcagagacgctatccctgctcacttattcatcagagacacaactaagtcaattctacacgttgtcaaagatttggttaccattgccattgttttctactgtgctaccttcatcgaaactttgccatccttggctttgagagttccagcatggatcacctactggattattcaaggtaccgtcatggttggtccatggattttggctcacgaatgtggtcacggtgccttttctaaacacaggaggatcaacaccattatcggttgggtcttgcattccgctttgttggttccttatcaggcattggcaatgtcacactctaagcaccacaagggtactggttccatggagaaggatttggtcttcattccagctactcgttcctacaaaggtctacctgcccgatatattgcttcctgggatgaagaagtttctgaacaagaacatcaccaccatgaagaatccatctttgctgaaaccccaatctacactttgggtgccttgttgttcgttttaaccttcggttggccattgtacctaattgttaacttctctggtcacgaagccccacactgggtcaaccacttccaaactgttgctccattgtacgaaccacaccaaagaaagaacatcttttactctaactgtggtattgttgctatgggctctattttgacctatttgtccatggttttctctccattaactgttttcatgtactacggtatcccatacttgggtgttaatgcttggattgtttgcattacttacttacaacacactgatccaaaggttcctcacttcagagacaacgaatggaattttcaaagaggtgccgcttgtaccatcgatagatccttcggtactattgtcaaccacttgcaccaccacatcggcgattcccaccaatgtcaccacatgttctctcaaatgccattctacaatgctgtcgaagctactaagtatctaaaggccaagctaggtaagtactacatcttcgacgacactccaattgccaaggctttgtacagaaactggagagaatgtaaattcgtcgaagacgaaggtgatgttgttttctacaagcactaa

SEQ ID NO: 430 - DNA, 1212 bp, Artificial sequence
  Delta-15 Desaturase
atggcccctccacacgtcgtcgacgaacaagttagaagaagaatcgttgttgaagacgagattaagtcaaagaaacaattcgagagaaactacgtcccaatggatttcactatcaaggaaatcagagacgctatccctgctcacttattcatcagagacacaactaagtcaattctacacgttgtcaaagatttggttaccattgccattgttttctactgtgctaccttcatcgaaactttgccatccttggctttgagagttccagcatggatcacctactggattattcaaggtaccgtcatggttggtccatggattttggctcacgaatgtggtcacggtgccttttctaaacacaggaggatcaacaccattatcggttgggtcttgcattccgctttgttggttccttatcaggcattggcaatgtcacactctaagcaccacaagggtactggttccatggagaaggatttggtcttcattccagctactcgttcctacaaaggtctacctgccgtatctgatgtttccagggataaagaagtttctgaacaagaacatcaccaccatgaagaatccatctttgctgaaaccccaatctacactttgggtgccttgttgttcgttttaaccttcggttggccattgtacctaattgttaacttctctggtcacgaagccccacactgggtcaaccacttccaaactgttgctccattgtacgaaccacaccaaagaaagaacatcttttactctaactgtggtattgttgctatgggctctattttgacctatttgtccatggttttctctccattaactgttttcatgtactacggtatcccatacttgggtgttaatgcttggattgtttgcattacttacttacaacacactgatccaaaggttcctcacttcagagacaacgaatggaattttcaaagaggtgccgcttgtaccatcgatagatccttcggtactattgtcaaccacttgcaccaccacatcggcgattcccaccaatgtcaccacatgttctctcaaatgccattctacaatgctgtcgaagctactaagtatctaaaggccaagctaggtaagtactacatcttcgacgacactccaattgccaaggctttgtacagaaactggagagaatgtaaattcgtcgaagacgaaggtgatgttgttttctacaagcactaa

SEQ ID NO: 431 - DNA, 1212 bp, Artificial sequence
  Delta-15 Desaturase
atggcccctccacacgtcgtcgacgaacaagttagaagaagaatcgttgttgaagacgagattaagtcaaagaaacaattcgagagaaactacgtcccaatggatttcactatcaaggaaatcagagacgctatccctgctcacttattcatcagagacacaactaagtcaattctacacgttgtcaaagatttggttaccattgccattgttttctactgtgctaccttcatcgaaactttgccatccttggctttgagagttccagcatggatcacctactggattattcaaggtaccgtcatggttggtccatggattttggctcacgaatgtggtcacggtgccttttctaaacacaggaggatcaacaccattatcggttgggtcttgcattccgctttgttggttccttatcaggcattggcaatgtcacactctaagcaccacaagggtactggttccatggagaaggatttggtcttcattccagctactcgttcctacaaaggtctacctgccctagcttttccttacaggaatgatgaagtttctgaacaagaacatcaccaccatgaagaatccatctttgctgaaaccccaatctacactttgggtgccttgttgttcgttttaaccttcggttggccattgtacctaattgttaacttctctggtcacgaagccccacactgggtcaaccacttccaaactgttgctccattgtacgaaccacaccaaagaaagaacatcttttactctaactgtggtattgttgctatgggctctattttgacctatttgtccatggttttctctccattaactgttttcatgtactacggtatcccatacttgggtgttaatgcttggattgtttgcattacttacttacaacacactgatccaaaggttcctcacttcagagacaacgaatggaattttcaaagaggtgccgcttgtaccatcgatagatccttcggtactattgtcaaccacttgcaccaccacatcggcgattcccaccaatgtcaccacatgttctctcaaatgccattctacaatgctgtcgaagctactaagtatctaaaggccaagctaggtaagtactacatcttcgacgacactccaattgccaaggctttgtacagaaactggagagaatgtaaattcgtcgaagacgaaggtgatgttgttttctacaagcactaa

SEQ ID NO: 432 - DNA, 1212 bp, Artificial sequence
  Delta-15 Desaturase
atggcccctccacacgtcgtcgacgaacaagttagaagaagaatcgttgttgaagacgagattaagtcaaagaaacaattcgagagaaactacgtcccaatggatttcactatcaaggaaatcagagacgctatccctgctcacttattcatcagagacacaactaagtcaattctacacgttgtcaaagatttggttaccattgccattgttttctactgtgctaccttcatcgaaactttgccatccttggctttgagagttccagcatggatcacctactggattattcaaggtaccgtcatggttggtccatggattttggctcacgaatgtggtcacggtgccttttctaaacacaggaggatcaacaccattatcggttgggtcttgcattccgctttgttggttccttatcaggcattggcaatgtcacactctaagcaccacaagggtactggttccatggagaaggatttggtcttcattccagctactcgttcctacaaaggtctacctgccgtatctattgttgacaggaatgaagaagtttctgaacaagaacatcaccaccatgaagaatccatctttgctgaaaccccaatctacactttgggtgccttgttgttcgttttaaccttcggttggccattgtacctaattgttaacttctctggtcacgaagccccacactgggtcaaccacttccaaactgttgctccattgtacgaaccacaccaaagaaagaacatcttttactctaactgtggtattgttgctatgggctctattttgacctatttgtccatggttttctctccattaactgttttcatgtactacggtatcccatacttgggtgttaatgcttggattgtttgcattacttacttacaacacactgatccaaaggttcctcacttcagagacaacgaatggaattttcaaagaggtgccgcttgtaccatcgatagatccttcggtactattgtcaaccacttgcaccaccacatcggcgattcccaccaatgtcaccacatgttctctcaaatgccattctacaatgctgtcgaagctactaagtatctaaaggccaagctaggtaagtactacatcttcgacgacactccaattgccaaggctttgtacagaaactggagagaatgtaaattcgtcgaagacgaaggtgatgttgttttctacaagcactaa

SEQ ID NO: 433 - DNA, 1212 bp, Artificial sequence
  Delta-15 Desaturase
atggcccctccacacgtcgtcgacgaacaagttagaagaagaatcgttgttgaagacgagattaagtcaaagaaacaattcgagagaaactacgtcccaatggatttcactatcaaggaaatcagagacgctatccctgctcacttattcatcagagacacaactaagtcaattctacacgttgtcaaagatttggttaccattgccattgttttctactgtgctaccttcatcgaaactttgccatccttggctttgagagttccagcatggatcacctactggattattcaaggtaccgtcatggttggtccatggattttggctcacgaatgtggtcacggtgccttttctaaacacaggaggatcaacaccattatcggttgggtcttgcattccgctttgttggttccttatcaggcattggcaatgtcacactctaagcaccacaagggtactggttccatggagaaggatttggtcttcattccagctactcgttcctacaaaggtctacctgccctagattatcttgccatggaggatcaagtttctgaacaagaacatcaccaccatgaagaatccatctttgctgaaaccccaatctacactttgggtgccttgttgttcgttttaaccttcggttggccattgtacctaattgttaacttctctggtcacgaagccccacactgggtcaaccacttccaaactgttgctccattgtacgaaccacaccaaagaaagaacatcttttactctaactgtggtattgttgctatgggctctattttgacctatttgtccatggttttctctccattaactgttttcatgtactacggtatcccatacttgggtgttaatgcttggattgtttgcattacttacttacaacacactgatccaaaggttcctcacttcagagacaacgaatggaattttcaaagaggtgccgcttgtaccatcgatagatccttcggtactattgtcaaccacttgcaccaccacatcggcgattcccaccaatgtcaccacatgttctctcaaatgccattctacaatgctgtcgaagctactaagtatctaaaggccaagctaggtaagtactacatcttcgacgacactccaattgccaaggctttgtacagaaactggagagaatgtaaattcgtcgaagacgaaggtgatgttgttttctacaagcactaa

SEQ ID NO: 434 - DNA, 1212 bp, Artificial sequence
  Delta-15 Desaturase
atggcccctccacacgtcgtcgacgaacaagttagaagaagaatcgttgttgaagacgagattaagtcaaagaaacaattcgagagaaactacgtcccaatggatttcactatcaaggaaatcagagacgctatccctgctcacttattcatcagagacacaactaagtcaattctacacgttgtcaaagatttggttaccattgccattgttttctactgtgctaccttcatcgaaactttgccatccttggctttgagagttccagcatggatcacctactggattattcaaggtaccgtcatggttggtccatggattttggctcacgaatgtggtcacggtgccttttctaaacacaggaggatcaacaccattatcggttgggtcttgcattccgctttgttggttccttatcaggcattggcaatgtcacactctaagcaccacaagggtactggttccatggagaaggatttggtcttcattccagctactcgttcctacaaaggtctacctgccctatctattgctgcctgggatgaagaagtttctgaacaagaacatcaccaccatgaagaatccatctttgctgaaaccccaatctacactttgggtgccttgttgttcgttttaaccttcggttggccattgtacctaattgttaacttctctggtcacgaagccccacactgggtcaaccacttccaaactgttgctccattgtacgaaccacaccaaagaaagaacatcttttactctaactgtggtattgttgctatgggctctattttgacctatttgtccatggttttctctccattaactgttttcatgtactacggtatcccatacttgggtgttaatgcttggattgtttgcattacttacttacaacacactgatccaaaggttcctcacttcagagacaacgaatggaattttcaaagaggtgccgcttgtaccatcgatagatccttcggtactattgtcaaccacttgcaccaccacatcggcgattcccaccaatgtcaccacatgttctctcaaatgccattctacaatgctgtcgaagctactaagtatctaaaggccaagctaggtaagtactacatcttcgacgacactccaattgccaaggctttgtacagaaactggagagaatgtaaattcgtcgaagacgaaggtgatgttgttttctacaagcactaa

SEQ ID NO: 435 - DNA, 1212 bp, Artificial sequence
  Delta-15 Desaturase
atggcccctccacacgtcgtcgacgaacaagttagaagaagaatcgttgttgaagacgagattaagtcaaagaaacaattcgagagaaactacgtcccaatggatttcactatcaaggaaatcagagacgctatccctgctcacttattcatcagagacacaactaagtcaattctacacgttgtcaaagatttggttaccattgccattgttttctactgtgctaccttcatcgaaactttgccatccttggctttgagagttccagcatggatcacctactggattattcaaggtaccgtcatggttggtccatggattttggctcacgaatgtggtcacggtgccttttctaaacacaggaggatcaacaccattatcggttgggtcttgcattccgctttgttggttccttatcaggcattggcaatgtcacactctaagcaccacaagggtactggttccatggagaaggatttggtcttcattccagctactcgttcctacaaaggtctacctgccggatattatccttacttggaggatgaagtttctgaacaagaacatcaccaccatgaagaatccatctttgctgaaaccccaatctacactttgggtgccttgttgttcgttttaaccttcggttggccattgtacctaattgttaacttctctggtcacgaagccccacactgggtcaaccacttccaaactgttgctccattgtacgaaccacaccaaagaaagaacatcttttactctaactgtggtattgttgctatgggctctattttgacctatttgtccatggttttctctccattaactgttttcatgtactacggtatcccatacttgggtgttaatgcttggattgtttgcattacttacttacaacacactgatccaaaggttcctcacttcagagacaacgaatggaattttcaaagaggtgccgcttgtaccatcgatagatccttcggtactattgtcaaccacttgcaccaccacatcggcgattcccaccaatgtcaccacatgttctctcaaatgccattctacaatgctgtcgaagctactaagtatctaaaggccaagctaggtaagtactacatcttcgacgacactccaattgccaaggctttgtacagaaactggagagaatgtaaattcgtcgaagacgaaggtgatgttgttttctacaagcactaa

SEQ ID NO: 436 - DNA, 1212 bp, Artificial sequence
  Delta-15 Desaturase
atggcccctccacacgtcgtcgacgaacaagttagaagaagaatcgttgttgaagacgagattaagtcaaagaaacaattcgagagaaactacgtcccaatggatttcactatcaaggaaatcagagacgctatccctgctcacttattcatcagagacacaactaagtcaattctacacgttgtcaaagatttggttaccattgccattgttttctactgtgctaccttcatcgaaactttgccatccttggctttgagagttccagcatggatcacctactggattattcaaggtaccgtcatggttggtccatggattttggctcacgaatgtggtcacggtgccttttctgaacccaagtcgttcaactacattttcggttgggtcttgcattccgctttgttggttccttatcaggcatgggcaatgtcacactctaagcaccacaagggtactggttccatgactaaggatgttgtcttcattccagctactcgttcctacaaaggtctacctgccctagaaaagcctgctgttgaagaagaagtttctgaacaagaacatcaccaccatgaagaatccatctttgctgaaaccccaatctacactttgggtgccttgttgttcgttttaaccttcggttggccattgtacctaattgttaacttctctggtcacgaagccccacactgggtcaaccacttccaaactgttgctccattgtacgaaccacaccaaagaaagaacatcttttactctaactgtggtattgttgctatgggctctattttgacctatttgtccatggttttctctccattaactgttttcatgtactacggtatcccatacttgggtgttaatgcttggattgtttgcattacttacttacaacacactgatccaaaggttcctcacttcagagacaacgaatggaattttcaaagaggtgccgcttgtaccatcgatagatccttcggtactattgtcaaccacttgcaccaccacatcggcgattcccaccaatgtcaccacatgttctctcaaatgccattctacaatgctgtcgaagctactaagtatctaaaggccaagctaggtaagtactacatcttcgacgacactccaattgccaaggctttgtacagaaactggagagaatgtaaattcgtcgaagacgaaggtgatgttgttttctacaagcactaa

SEQ ID NO: 437 - DNA, 1212 bp, Artificial sequence
  Delta-15 Desaturase
atggcccctccacacgtcgtcgacgaacaagttagaagaagaatcgttgttgaagacgagattaagtcaaagaaacaattcgagagaaactacgtcccaatggatttcactatcaaggaaatcagagacgctatccctgctcacttattcatcagagacacaactaagtcaattctacacgttgtcaaagatttggttaccattgccattgttttctactgtgctaccttcatcgaaactttgccatccttggctttgagagttccagcatggatcacctactggattattcaaggtaccgtcatggttggtccatggattttggctcacgaatgtggtcacggtgccttttctgattccaagactatcaacactattttcggttgggtcttgcattccgctttgttggttccttatcaggcatgggcaatgtcacactctaagcaccacaagggtactggtactatgactaaggatgttgtcttcattccagctactcgttcctacaaaggtctacctgccctagaaaagcctgctgttgaagaagaagtttctgaacaagaacatcaccaccatgaagaatccatctttgctgaaaccccaatctacactttgggtgccttgttgttcgttttaaccttcggttggccattgtacctaattgttaacttctctggtcacgaagccccacactgggtcaaccacttccaaactgttgctccattgtacgaaccacaccaaagaaagaacatcttttactctaactgtggtattgttgctatgggctctattttgacctatttgtccatggttttctctccattaactgttttcatgtactacggtatcccatacttgggtgttaatgcttggattgtttgcattacttacttacaacacactgatccaaaggttcctcacttcagagacaacgaatggaattttcaaagaggtgccgcttgtaccatcgatagatccttcggtactattgtcaaccacttgcaccaccacatcggcgattcccaccaatgtcaccacatgttctctcaaatgccattctacaatgctgtcgaagctactaagtatctaaaggccaagctaggtaagtactacatcttcgacgacactccaattgccaaggctttgtacagaaactggagagaatgtaaattcgtcgaagacgaaggtgatgttgttttctacaagcactaa

SEQ ID NO: 438 - DNA, 1212 bp, Artificial sequence
  Delta-15 Desaturase
atggcccctccacacgtcgtcgacgaacaagttagaagaagaatcgttgttgaagacgagattaagtcaaagaaacaattcgagagaaactacgtcccaatggatttcactatcaaggaaatcagagacgctatccctgctcacttattcatcagagacacaactaagtcaattctacacgttgtcaaagatttggttaccattgccattgttttctactgtgctaccttcatcgaaactttgccatccttggctttgagagttccagcatggatcacctactggattattcaaggtaccgtcatggttggtccatggattttggctcacgaatgtggtcacggtgccttttctgattccaagactatcaacactattttcggttgggtcttgcattccgctttgttggttccttatcaggcatgggcaatgtcacactctaagcaccacaagggtactggttccatgaagaaggatctggtcttcattccagctactcgttcctacaaaggtctacctgccctagaaaagcctgctgttgaagaagaagtttctgaacaagaacatcaccaccatgaagaatccatctttgctgaaaccccaatctacactttgggtgccttgttgttcgttttaaccttcggttggccattgtacctaattgttaacttctctggtcacgaagccccacactgggtcaaccacttccaaactgttgctccattgtacgaaccacaccaaagaaagaacatcttttactctaactgtggtattgttgctatgggctctattttgacctatttgtccatggttttctctccattaactgttttcatgtactacggtatcccatacttgggtgttaatgcttggattgtttgcattacttacttacaacacactgatccaaaggttcctcacttcagagacaacgaatggaattttcaaagaggtgccgcttgtaccatcgatagatccttcggtactattgtcaaccacttgcaccaccacatcggcgattcccaccaatgtcaccacatgttctctcaaatgccattctacaatgctgtcgaagctactaagtatctaaaggccaagctaggtaagtactacatcttcgacgacactccaattgccaaggctttgtacagaaactggagagaatgtaaattcgtcgaagacgaaggtgatgttgttttctacaagcactaa

SEQ ID NO: 439 - DNA, 1212 bp, Artificial sequence
  Delta-15 Desaturase
atggcccctccacacgtcgtcgacgaacaagttagaagaagaatcgttgttgaagacgagattaagtcaaagaaacaattcgagagaaactacgtcccaatggatttcactatcaaggaaatcagagacgctatccctgctcacttattcatcagagacacaactaagtcaattctacacgttgtcaaagatttggttaccattgccattgttttctactgtgctaccttcatcgaaactttgccatccttggctttgagagttccagcatggatcacctactggattattcaaggtaccgtcatggttggtccatggattttggctcacgaatgtggtcacggtgccttttctgattccaagactatcaacactattttcggttgggtcttgcattccgctttgttggttccttatcagacatgggcaatgtcacactctaagcaccacaagtatactggtcatatgactaaggatgttgtcttcattccagctactcgttcctacaaaggtctacctgccctagaaaagcctgctgttgaagaagaagtttctgaacaagaacatcaccaccatgaagaatccatctttgctgaaaccccaatctacactttgggtgccttgttgttcgttttaaccttcggttggccattgtacctaattgttaacttctctggtcacgaagccccacactgggtcaaccacttccaaactgttgctccattgtacgaaccacaccaaagaaagaacatcttttactctaactgtggtattgttgctatgggctctattttgacctatttgtccatggttttctctccattaactgttttcatgtactacggtatcccatacttgggtgttaatgcttggattgtttgcattacttacttacaacacactgatccaaaggttcctcacttcagagacaacgaatggaattttcaaagaggtgccgcttgtaccatcgatagatccttcggtactattgtcaaccacttgcaccaccacatcggcgattcccaccaatgtcaccacatgttctctcaaatgccattctacaatgctgtcgaagctactaagtatctaaaggccaagctaggtaagtactacatcttcgacgacactccaattgccaaggctttgtacagaaactggagagaatgtaaattcgtcgaagacgaaggtgatgttgttttctacaagcactaa

SEQ ID NO: 440 - DNA, 1212 bp, Artificial sequence
  Delta-15 Desaturase
atggcccctccacacgtcgtcgacgaacaagttagaagaagaatcgttgttgaagacgagattaagtcaaagaaacaattcgagagaaactacgtcccaatggatttcactatcaaggaaatcagagacgctatccctgctcacttattcatcagagacacaactaagtcaattctacacgttgtcaaagatttggttaccattgccattgttttctactgtgctaccttcatcgaaactttgccatccttggctttgagagttccagcatggatcacctactggattattcaaggtaccgtcatggttggtccatggattttggctcacgaatgtggtcacggtgccttttctgattccaagactatcaacactattttcggttgggtcttgcattccgctttgttggttccttatcaggcatgggcaatgtcacactctaagcaccacaagggtactggttccatgaagaaggatttcgtcttcattccagctactcgttcctacaaaggtctacctgccctagaaaagcctgctgttgaagaagaagtttctgaacaagaacatcaccaccatgaagaatccatctttgctgaaaccccaatctacactttgggtgccttgttgttcgttttaaccttcggttggccattgtacctaattgttaacttctctggtcacgaagccccacactgggtcaaccacttccaaactgttgctccattgtacgaaccacaccaaagaaagaacatcttttactctaactgtggtattgttgctatgggctctattttgacctatttgtccatggttttctctccattaactgttttcatgtactacggtatcccatacttgggtgttaatgcttggattgtttgcattacttacttacaacacactgatccaaaggttcctcacttcagagacaacgaatggaattttcaaagaggtgccgcttgtaccatcgatagatccttcggtactattgtcaaccacttgcaccaccacatcggcgattcccaccaatgtcaccacatgttctctcaaatgccattctacaatgctgtcgaagctactaagtatctaaaggccaagctaggtaagtactacatcttcgacgacactccaattgccaaggctttgtacagaaactggagagaatgtaaattcgtcgaagacgaaggtgatgttgttttctacaagcactaa

SEQ ID NO: 441 - DNA, 1212 bp, Artificial sequence
  Delta-15 Desaturase
atggcccctccacacgtcgtcgacgaacaagttagaagaagaatcgttgttgaagacgagattaagtcaaagaaacaattcgagagaaactacgtcccaatggatttcactatcaaggaaatcagagacgctatccctgctcacttattcatcagagacacaactaagtcaattctacacgttgtcaaagatttggttaccattgccattgttttctactgtgctaccttcatcgaaactttgccatccttggctttgagagttccagcatggatcacctactggattattcaaggtaccgtcatggttggtccatggattttggctcacgaatgtggtcacggtgccttttctgattccaagactatcaacactattttcggttgggtcttgcattccgctttgttggttccttatcaggcatgggcaatgtcacactctaagcaccacaaggctactggtcatatgaagaaggatttggtcttcattccagctactcgttcctacaaaggtctacctgccctagaaaagcctgctgttgaagaagaagtttctgaacaagaacatcaccaccatgaagaatccatctttgctgaaaccccaatctacactttgggtgccttgttgttcgttttaaccttcggttggccattgtacctaattgttaacttctctggtcacgaagccccacactgggtcaaccacttccaaactgttgctccattgtacgaaccacaccaaagaaagaacatcttttactctaactgtggtattgttgctatgggctctattttgacctatttgtccatggttttctctccattaactgttttcatgtactacggtatcccatacttgggtgttaatgcttggattgtttgcattacttacttacaacacactgatccaaaggttcctcacttcagagacaacgaatggaattttcaaagaggtgccgcttgtaccatcgatagatccttcggtactattgtcaaccacttgcaccaccacatcggcgattcccaccaatgtcaccacatgttctctcaaatgccattctacaatgctgtcgaagctactaagtatctaaaggccaagctaggtaagtactacatcttcgacgacactccaattgccaaggctttgtacagaaactggagagaatgtaaattcgtcgaagacgaaggtgatgttgttttctacaagcactaa

SEQ ID NO: 442 - DNA, 1212 bp, Artificial sequence
  Delta-15 Desaturase
atggcccctccacacgtcgtcgacgaacaagttagaagaagaatcgttgttgaagacgagattaagtcaaagaaacaattcgagagaaactacgtcccaatggatttcactatcaaggaaatcagagacgctatccctgctcacttattcatcagagacacaactaagtcaattctacacgttgtcaaagatttggttaccattgccattgttttctactgtgctaccttcatcgaaactttgccatccttggctttgagagttccagcatggatcacctactggattattcaaggtaccgtcatggttggtccatggattttggctcacgaatgtggtcacggtgccttttctgattccaagactatcaacactattttcggttgggtcttgcattccgctttgttggttccttatcaggcatgggcaatgtcacactctaagcaccacaagtatactggtactatggagaaggatgtcgtcttcattccagctactcgttcctacaaaggtctacctgccctagaaaagcctgctgttgaagaagaagtttctgaacaagaacatcaccaccatgaagaatccatctttgctgaaaccccaatctacactttgggtgccttgttgttcgttttaaccttcggttggccattgtacctaattgttaacttctctggtcacgaagccccacactgggtcaaccacttccaaactgttgctccattgtacgaaccacaccaaagaaagaacatcttttactctaactgtggtattgttgctatgggctctattttgacctatttgtccatggttttctctccattaactgttttcatgtactacggtatcccatacttgggtgttaatgcttggattgtttgcattacttacttacaacacactgatccaaaggttcctcacttcagagacaacgaatggaattttcaaagaggtgccgcttgtaccatcgatagatccttcggtactattgtcaaccacttgcaccaccacatcggcgattcccaccaatgtcaccacatgttctctcaaatgccattctacaatgctgtcgaagctactaagtatctaaaggccaagctaggtaagtactacatcttcgacgacactccaattgccaaggctttgtacagaaactggagagaatgtaaattcgtcgaagacgaaggtgatgttgttttctacaagcactaa

SEQ ID NO: 443 - DNA, 1212 bp, Artificial sequence
  Delta-15 Desaturase
atggcccctccacacgtcgtcgacgaacaagttagaagaagaatcgttgttgaagacgagattaagtcaaagaaacaattcgagagaaactacgtcccaatggatttcactatcaaggaaatcagagacgctatccctgctcacttattcatcagagacacaactaagtcaattctacacgttgtcaaagatttggttaccattgccattgttttctactgtgctaccttcatcgaaactttgccatccttggctttgagagttccagcatggatcacctactggattattcaaggtaccgtcatggttggtccatggattttggctcacgaatgtggtcacggtgccttttctgattccaagactatcaacactattttcggttgggtcttgcattccgctttgttggttccttatcaggcatgggcaatgtcacactctaagcaccacaaggatactggtcatatggcgaaggatgtggtcttcattccagctactcgttcctacaaaggtctacctgccctagaaaagcctgctgttgaagaagaagtttctgaacaagaacatcaccaccatgaagaatccatctttgctgaaaccccaatctacactttgggtgccttgttgttcgttttaaccttcggttggccattgtacctaattgttaacttctctggtcacgaagccccacactgggtcaaccacttccaaactgttgctccattgtacgaaccacaccaaagaaagaacatcttttactctaactgtggtattgttgctatgggctctattttgacctatttgtccatggttttctctccattaactgttttcatgtactacggtatcccatacttgggtgttaatgcttggattgtttgcattacttacttacaacacactgatccaaaggttcctcacttcagagacaacgaatggaattttcaaagaggtgccgcttgtaccatcgatagatccttcggtactattgtcaaccacttgcaccaccacatcggcgattcccaccaatgtcaccacatgttctctcaaatgccattctacaatgctgtcgaagctactaagtatctaaaggccaagctaggtaagtactacatcttcgacgacactccaattgccaaggctttgtacagaaactggagagaatgtaaattcgtcgaagacgaaggtgatgttgttttctacaagcactaa

SEQ ID NO: 444 - DNA, 1212 bp, Artificial sequence
  Delta-15 Desaturase
atggcccctccacacgtcgtcgacgaacaagttagaagaagaatcgttgttgaagacgagattaagtcaaagaaacaattcgagagaaactacgtcccaatggatttcactatcaaggaaatcagagacgctatccctgctcacttattcatcagagacacaactaagtcaattctacacgttgtcaaagatttggttaccattgccattgttttctactgtgctaccttcatcgaaactttgccatccttggctttgagagttccagcatggatcacctactggattattcaaggtaccgtcatggttggtccatggattttggctcacgaatgtggtcacggtgccttttctgattccaagactatcaacactattttcggttgggtcttgcattccgctttgttggttccttatcaggcatgggcaatgtcacactctaagcaccacaagggtactggtagtatggcgaaggatttcgtcttcattccagctactcgttcctacaaaggtctacctgccctagaaaagcctgctgttgaagaagaagtttctgaacaagaacatcaccaccatgaagaatccatctttgctgaaaccccaatctacactttgggtgccttgttgttcgttttaaccttcggttggccattgtacctaattgttaacttctctggtcacgaagccccacactgggtcaaccacttccaaactgttgctccattgtacgaaccacaccaaagaaagaacatcttttactctaactgtggtattgttgctatgggctctattttgacctatttgtccatggttttctctccattaactgttttcatgtactacggtatcccatacttgggtgttaatgcttggattgtttgcattacttacttacaacacactgatccaaaggttcctcacttcagagacaacgaatggaattttcaaagaggtgccgcttgtaccatcgatagatccttcggtactattgtcaaccacttgcaccaccacatcggcgattcccaccaatgtcaccacatgttctctcaaatgccattctacaatgctgtcgaagctactaagtatctaaaggccaagctaggtaagtactacatcttcgacgacactccaattgccaaggctttgtacagaaactggagagaatgtaaattcgtcgaagacgaaggtgatgttgttttctacaagcactaa

SEQ ID NO: 445 - DNA, 1212 bp, Artificial sequence
  Delta-15 Desaturase
atggcccctccacacgtcgtcgacgaacaagttagaagaagaatcgttgttgaagacgagattaagtcaaagaaacaattcgagagaaactacgtcccaatggatttcactatcaaggaaatcagagacgctatccctgctcacttattcatcagagacacaactaagtcaattctacacgttgtcaaagatttggttaccattgccattgttttctactgtgctaccttcatcgaaactttgccatccttggctttgagagttccagcatggatcacctactggattattcaaggtaccgtcatggttggtccatggattttggctcacgaatgtggtcacggtgccttttctgattccaagactatcaacactattttcggttgggtcttgcattccgctttgttggttccttatcaggcatgggcaatgtcacactctaagcaccacaagtctactggtgatatgaagaaggatctggtcttcattccagctactcgttcctacaaaggtctacctgccctagaaaagcctgctgttgaagaagaagtttctgaacaagaacatcaccaccatgaagaatccatctttgctgaaaccccaatctacactttgggtgccttgttgttcgttttaaccttcggttggccattgtacctaattgttaacttctctggtcacgaagccccacactgggtcaaccacttccaaactgttgctccattgtacgaaccacaccaaagaaagaacatcttttactctaactgtggtattgttgctatgggctctattttgacctatttgtccatggttttctctccattaactgttttcatgtactacggtatcccatacttgggtgttaatgcttggattgtttgcattacttacttacaacacactgatccaaaggttcctcacttcagagacaacgaatggaattttcaaagaggtgccgcttgtaccatcgatagatccttcggtactattgtcaaccacttgcaccaccacatcggcgattcccaccaatgtcaccacatgttctctcaaatgccattctacaatgctgtcgaagctactaagtatctaaaggccaagctaggtaagtactacatcttcgacgacactccaattgccaaggctttgtacagaaactggagagaatgtaaattcgtcgaagacgaaggtgatgttgttttctacaagcactaa

SEQ ID NO: 446 - DNA, 1212 bp, Artificial sequence
  Delta-15 Desaturase
atggcccctccacacgtcgtcgacgaacaagttagaagaagaatcgttgttgaagacgagattaagtcaaagaaacaattcgagagaaactacgtcccaatggatttcactatcaaggaaatcagagacgctatccctgctcacttattcatcagagacacaactaagtcaattctacacgttgtcaaagatttggttaccattgccattgttttctactgtgctaccttcatcgaaactttgccatccttggctttgagagttccagcatggatcacctactggattattcaaggtaccgtcatggttggtccatggattttggctcacgaatgtggtcacggtgccttttctgattccaagactatcaacactattttcggttgggtcttgcattccgctttgttggttccttatcaggcatgggcaatgtcacactctaagcaccacaagtttactggtaatatgtcgaaggatctcgtcttcattccagctactcgttcctacaaaggtctacctgccctagaaaagcctgctgttgaagaagaagtttctgaacaagaacatcaccaccatgaagaatccatctttgctgaaaccccaatctacactttgggtgccttgttgttcgttttaaccttcggttggccattgtacctaattgttaacttctctggtcacgaagccccacactgggtcaaccacttccaaactgttgctccattgtacgaaccacaccaaagaaagaacatcttttactctaactgtggtattgttgctatgggctctattttgacctatttgtccatggttttctctccattaactgttttcatgtactacggtatcccatacttgggtgttaatgcttggattgtttgcattacttacttacaacacactgatccaaaggttcctcacttcagagacaacgaatggaattttcaaagaggtgccgcttgtaccatcgatagatccttcggtactattgtcaaccacttgcaccaccacatcggcgattcccaccaatgtcaccacatgttctctcaaatgccattctacaatgctgtcgaagctactaagtatctaaaggccaagctaggtaagtactacatcttcgacgacactccaattgccaaggctttgtacagaaactggagagaatgtaaattcgtcgaagacgaaggtgatgttgttttctacaagcactaa

SEQ ID NO: 447 - DNA, 1212 bp, Artificial sequence
  Delta-15 Desaturase
atggcccctccacacgtcgtcgacgaacaagttagaagaagaatcgttgttgaagacgagattaagtcaaagaaacaattcgagagaaactacgtcccaatggatttcactatcaaggaaatcagagacgctatccctgctcacttattcatcagagacacaactaagtcaattctacacgttgtcaaagatttggttaccattgccattgttttctactgtgctaccttcatcgaaactttgccatccttggctttgagagttccagcatggatcacctactggattattcaaggtaccgtcatggttggtccatggattttggctcacgaatgtggtcacggtgccttttctgattccaagactatcaacactattttcggttgggtcttgcattccgctttgttggttccttatcaggcatgggcaatgtcacactctaagcaccacaagtatactggtaatatgacgaaggatatcgtcttcattccagctactcgttcctacaaaggtctacctgccctagaaaagcctgctgttgaagaagaagtttctgaacaagaacatcaccaccatgaagaatccatctttgctgaaaccccaatctacactttgggtgccttgttgttcgttttaaccttcggttggccattgtacctaattgttaacttctctggtcacgaagccccacactgggtcaaccacttccaaactgttgctccattgtacgaaccacaccaaagaaagaacatcttttactctaactgtggtattgttgctatgggctctattttgacctatttgtccatggttttctctccattaactgttttcatgtactacggtatcccatacttgggtgttaatgcttggattgtttgcattacttacttacaacacactgatccaaaggttcctcacttcagagacaacgaatggaattttcaaagaggtgccgcttgtaccatcgatagatccttcggtactattgtcaaccacttgcaccaccacatcggcgattcccaccaatgtcaccacatgttctctcaaatgccattctacaatgctgtcgaagctactaagtatctaaaggccaagctaggtaagtactacatcttcgacgacactccaattgccaaggctttgtacagaaactggagagaatgtaaattcgtcgaagacgaaggtgatgttgttttctacaagcactaa

SEQ ID NO: 448 - DNA, 1212 bp, Artificial sequence
  Delta-15 Desaturase
atggcccctccacacgtcgtcgacgaacaagttagaagaagaatcgttgttgaagacgagattaagtcaaagaaacaattcgagagaaactacgtcccaatggatttcactatcaaggaaatcagagacgctatccctgctcacttattcatcagagacacaactaagtcaattctacacgttgtcaaagatttggttaccattgccattgttttctactgtgctaccttcatcgaaactttgccatccttggctttgagagttccagcatggatcacctactggattattcaaggtaccgtcatggttggtccatggattttggctcacgaatgtggtcacggtgccttttctgattccaagactatcaacactattttcggttgggtcttgcattccgctttgttggttccttatcaggcatgggcaatgtcacactctaagcaccacaaggatactggtagtatgacgaaggatatcgtcttcattccagctactcgttcctacaaaggtctacctgccctagaaaagcctgctgttgaagaagaagtttctgaacaagaacatcaccaccatgaagaatccatctttgctgaaaccccaatctacactttgggtgccttgttgttcgttttaaccttcggttggccattgtacctaattgttaacttctctggtcacgaagccccacactgggtcaaccacttccaaactgttgctccattgtacgaaccacaccaaagaaagaacatcttttactctaactgtggtattgttgctatgggctctattttgacctatttgtccatggttttctctccattaactgttttcatgtactacggtatcccatacttgggtgttaatgcttggattgtttgcattacttacttacaacacactgatccaaaggttcctcacttcagagacaacgaatggaattttcaaagaggtgccgcttgtaccatcgatagatccttcggtactattgtcaaccacttgcaccaccacatcggcgattcccaccaatgtcaccacatgttctctcaaatgccattctacaatgctgtcgaagctactaagtatctaaaggccaagctaggtaagtactacatcttcgacgacactccaattgccaaggctttgtacagaaactggagagaatgtaaattcgtcgaagacgaaggtgatgttgttttctacaagcactaa

SEQ ID NO: 449 - DNA, 1212 bp, Artificial sequence
  Delta-15 Desaturase
atggcccctccacacgtcgtcgacgaacaagttagaagaagaatcgttgttgaagacgagattaagtcaaagaaacaattcgagagaaactacgtcccaatggatttcactatcaaggaaatcagagacgctatccctgctcacttattcatcagagacacaactaagtcaattctacacgttgtcaaagatttggttaccattgccattgttttctactgtgctaccttcatcgaaactttgccatccttggctttgagagttccagcatggatcacctactggattattcaaggtaccgtcatggttggtccatggattttggctcacgaatgtggtcacggtgccttttctgattccaagactatcaacactattttcggttgggtcttgcattccgctttgttggttccttatcaggcatgggcaatgtcacactctaagcaccacaagtctactggtgctatgtcgaaggatgtggtcttcattccagctactcgttcctacaaaggtctacctgccctagaaaagcctgctgttgaagaagaagtttctgagcaagaacatcaccaccatgaagaatccatctttgctgaaaccccaatctacactttgggtgccttgttgttcgttttaaccttcggttggccattgtacctaattgttaacttctctggtcacgaagccccacactgggtcaaccacttccaaactgttgctccattgtacgaaccacaccaaagaaagaacatcttttactctaactgtggtattgttgctatgggctctattttgacctatttgtccatggttttctctccattaactgttttcatgtactacggtatcccatacttgggtgttaatgcttggattgtttgcattacttacttacaacacactgatccaaaggttcctcacttcagagacaacgaatggaattttcaaagaggtgccgcttgtaccatcgatagatccttcggtactattgtcaaccacttgcaccaccacatcggcgattcccaccaatgtcaccacatgttctctcaaatgccattctacaatgctgtcgaagctactaagtatctaaaggccaagctaggtaagtactacatcttcgacgacactccaattgccaaggctttgtacagaaactggagagaatgtaaattcgtcgaagacgaaggtgatgttgttttctacaagcactaa

SEQ ID NO: 450 - DNA, 1212 bp, Artificial sequence
  Delta-15 Desaturase
atggcccctccacacgtcgtcgacgaacaagttagaagaagaatcgttgttgaagacgagattaagtcaaagaaacaattcgagagaaactacgtcccaatggatttcactatcaaggaaatcagagacgctatccctgctcacttattcatcagagacacaactaagtcaattctacacgttgtcaaagatttggttaccattgccattgttttctactgtgctaccttcatcgaaactttgccatccttggctttgagagttccagcatggatcacctactggattattcaaggtaccgtcatggttggtccatggattttggctcacgaatgtggtcacggtgccttttctgattccaagactatcaacactattttcggttgggtcttgcattccgctttgttggttccttatcaggcatgggcaatgtcacactctaagcaccacaagtttactggtgctatgtcgaaggatgtcgtcttcattccagctactcgttcctacaaaggtctacctgccctagaaaagcctgctgttgaagaagaagtttctgaacaagaacatcaccaccatgaagaatccatctttgctgaaaccccaatctacactttgggtgccttgttgttcgttttaaccttcggttggccattgtacctaattgttaacttctctggtcacgaagccccacactgggtcaaccacttccaaactgttgctccattgtacgaaccacaccaaagaaagaacatcttttactctaactgtggtattgttgctatgggctctattttgacctatttgtccatggttttctctccattaactgttttcatgtactacggtatcccatacttgggtgttaatgcttggattgtttgcattacttacttacaacacactgatccaaaggttcctcacttcagagacaacgaatggaattttcaaagaggtgccgcttgtaccatcgatagatccttcggtactattgtcaaccacttgcaccaccacatcggcgattcccaccaatgtcaccacatgttctctcaaatgccattctacaatgctgtcgaagctactaagtatctaaaggccaagctaggtaagtactacatcttcgacgacactccaattgccaaggctttgtacagaaactggagagaatgtaaattcgtcgaagacgaaggtgatgttgttttctacaagcactaa

SEQ ID NO: 451 - DNA, 1212 bp, Artificial sequence
  Delta-15 Desaturase
atggcccctccacacgtcgtcgacgaacaagttagaagaagaatcgttgttgaagacgagattaagtcaaagaaacaattcgagagaaactacgtcccaatggatttcactatcaaggaaatcagagacgctatccctgctcacttattcatcagagacacaactaagtcaattctacacgttgtcaaagatttggttaccattgccattgttttctactgtgctaccttcatcgaaactttgccatccttggctttgagagttccagcatggatcacctactggattattcaaggtaccgtcatggttggtccatggattttggctcacgaatgtggtcacggtgccttttctgattccaagactatcaacactattttcggttgggtcttgcattccgctttgttggttccttatcaggcatgggcaatgtcacactctaagcaccacaagtttactggtagtatgacgaaggatgtggtcttcattccagctactcgttcctacaaaggtctacctgccctagaaaagcctgctgttgaagaagaagtttctgaacaagaacatcaccaccatgaagaatccatctttgctgaaaccccaatctacactttgggtgccttgttgttcgttttaaccttcggttggccattgtacctaattgttaacttctctggtcacgaagccccacactgggtcaaccacttccaaactgttgctccattgtacgaaccacaccaaagaaagaacatcttttactctaactgtggtattgttgctatgggctctattttgacctatttgtccatggttttctctccattaactgttttcatgtactacggtatcccatacttgggtgttaatgcttggattgtttgcattacttacttacaacacactgatccaaaggttcctcacttcagagacaacgaatggaattttcaaagaggtgccgcttgtaccatcgatagatccttcggtactattgtcaaccacttgcaccaccacatcggcgattcccaccaatgtcaccacatgttctctcaaatgccattctacaatgctgtcgaagctactaagtatctaaaggccaagctaggtaagtactacatcttcgacgacactccaattgccaaggctttgtacagaaactggagagaatgtaaattcgtcgaagacgaaggtgatgttgttttctacaagcactaa

SEQ ID NO: 452 - DNA, 1212 bp, Artificial sequence
  Delta-15 Desaturase
atggcccctccacacgtcgtcgacgaacaagttagaagaagaatcgttgttgaagacgagattaagtcaaagaaacaattcgagagaaactacgtcccaatggatttcactatcaaggaaatcagagacgctatccctgctcacttattcatcagagacacaactaagtcaattctacacgttgtcaaagatttggttaccattgccattgttttctactgtgctaccttcatcgaaactttgccatccttggctttgagagttccagcatggatcacctactggattattcaaggtaccgtcatggttggtccatggattttggctcacgaatgtggtcacggtgccttttctgattccaagactatcaacactattttcggttgggtcttgcattccgctttgttggttccttatcaggcatgggcaatgtcacactctaagcaccacaagtttactggtgctatgacgaaggatgtggtcttcattccagctactcgttcctacaaaggtctacctgccctagaaaagcctgctgttgaagaagaagtttctgaacaagaacatcaccaccatgaagaatccatctttgctgaaaccccaatctacactttgggtgccttgttgttcgttttaaccttcggttggccattgtacctaattgttaacttctctggtcacgaagccccacactgggtcaaccacttccaaactgttgctccattgtacgaaccacaccaaagaaagaacatcttttactctaactgtggtattgttgctatgggctctattttgacctatttgtccatggttttctctccattaactgttttcatgtactacggtatcccatacttgggtgttaatgcttggattgtttgcattacttacttacaacacactgatccaaaggttcctcacttcagagacaacgaatggaattttcaaagaggtgccgcttgtaccatcgatagatccttcggtactattgtcaaccacttgcaccaccacatcggcgattcccaccaatgtcaccacatgttctctcaaatgccattctacaatgctgtcgaagctactaagtatctaaaggccaagctaggtaagtactacatcttcgacgacactccaattgccaaggctttgtacagaaactggagagaatgtaaattcgtcgaagacgaaggtgatgttgttttctacaagcactaa

SEQ ID NO: 453 - DNA, 1212 bp, Artificial sequence
  Delta-15 Desaturase
atggcccctccacacgtcgtcgacgaacaagttagaagaagaatcgttgttgaagacgagattaagtcaaagaaacaattcgagagaaactacgtcccaatggatttcactatcaaggaaatcagagacgctatccctgctcacttattcatcagagacacaactaagtcaattctacacgttgtcaaagatttggttaccattgccattgttttctactgtgctaccttcatcgaaactttgccatccttggctttgagagttccagcatggatcacctactggattattcaaggtaccgtcatggttggtccatggattttggctcacgaatgtggtcacggtgccttttctgattccaagactatcaacactattttcggttgggtcttgcattccgctttgttggttccttatcaggcatgggcaatgtcacactctaagcaccacaagggtactggttccatggagaaggatttggtcttcattccagctactcgttcctacaaaggtctacctgccctagaaaagcctgctgttgaagaagaagtttctgaacaagaacatcaccaccatgaagaatccatctttgctgaaaccccaatctacactttgggtgccttgttgttcgttttaaccttcggttggccattgtacctaattgttaacttctctggtcacgaagccccacactgggtcaaccacttccaaactgttgctccattgtacgaaccacaccaaagaaagaacatcttttactctaactgtggtattgttgctatgggctctattttgacctatttgtccatggttttctctccattaactgttttcatgtactacggtatcccatacttgggtgttaatgcttggattgtttgcattacttacttacaacacactgatccaaaggttcctcacttcagagacaacgaatggaattttcaaagaggtgccgcttgtaccatcgatagatccttcggtactattgtcaaccacttgcaccaccacatcggcgattcccaccaatgtcaccacatgttctctcaaatgccattctacaatgctgtcgaagctactaagtatctaaaggccaagctaggtaagtactacatcttcgacgacactccaattgccaaggctttgtacagaaactggagagaatgtaaattcgtcgaagacgaaggtgatgttgttttctacaagcactaa

SEQ ID NO: 454 - DNA, 1212 bp, Artificial sequence
  Delta-15 Desaturase
atggcccctccacacgtcgtcgacgaacaagttagaagaagaatcgttgttgaagacgagattaagtcaaagaaacaattcgagagaaactacgtcccaatggatttcactatcaaggaaatcagagacgctatccctgctcacttattcatcagagacacaactaagtcaattctacacgttgtcaaagatttggttaccattgccattgttttctactgtgctaccttcatcgaaactttgccatccttggctttgagagttccagcatggatcacctactggattattcaaggtaccgtcatggttggtccatggattttggctcacgaatgtggtcacggtgccttttctgattccaagactatcaacactattttcggttgggtcttgcattccgctttgttggttccttatcaggcatgggcaatgtcacactctaagcaccacaagggtactggttccatggagaaggatttcgtcttcattccagctactcgttcctacaaaggtctacctgccctagaaaagcctgctgttgaagaagaagtttctgaacaagaacatcaccaccatgaagaatccatctttgctgaaaccccaatctacactttgggtgccttgttgttcgttttaaccttcggttggccattgtacctaattgttaacttctctggtcacgaagccccacactgggtcaaccacttccaaactgttgctccattgtacgaaccacaccaaagaaagaacatcttttactctaactgtggtattgttgctatgggctctattttgacctatttgtccatggttttctctccattaactgttttcatgtactacggtatcccatacttgggtgttaatgcttggattgtttgcattacttacttacaacacactgatccaaaggttcctcacttcagagacaacgaatggaattttcaaagaggtgccgcttgtaccatcgatagatccttcggtactattgtcaaccacttgcaccaccacatcggcgattcccaccaatgtcaccacatgttctctcaaatgccattctacaatgctgtcgaagctactaagtatctaaaggccaagctaggtaagtactacatcttcgacgacactccaattgccaaggctttgtacagaaactggagagaatgtaaattcgtcgaagacgaaggtgatgttgttttctacaagcactaa

SEQ ID NO: 455 - DNA, 1212 bp, Artificial sequence
  Delta-15 Desaturase
atggcccctccacacgtcgtcgacgaacaagttagaagaagaatcgttgttgaagacgagattaagtcaaagaaacaattcgagagaaactacgtcccaatggatttcactatcaaggaaatcagagacgctatccctgctcacttattcatcagagacacaactaagtcaattctacacgttgtcaaagatttggttaccattgccattgttttctactgtgctaccttcatcgaaactttgccatccttggctttgagagttccagcatggatcacctactggattattcaaggtaccgtcatggttggtccatggattttggctcacgaatgtggtcacggtgccttttctgattccaagactatcaacactattttcggttgggtcttgcattccgctttgttggttccttatcaggcatgggcaatgtcacactctaagcaccacaagggtactggttccatgaagaaggatttggtcttcattccagctactcgttcctacaaaggtctacctgccctagaaaagcctgctgttgaagaagaagtttctgaacaagaacatcaccaccatgaagaatccatctttgctgaaaccccaatctacactttgggtgccttgttgttcgttttaaccttcggttggccattgtacctaattgttaacttctctggtcacgaagccccacactgggtcaaccacttccaaactgttgctccattgtacgaaccacaccaaagaaagaacatcttttactctaactgtggtattgttgctatgggctctattttgacctatttgtccatggttttctctccattaactgttttcatgtactacggtatcccatacttgggtgttaatgcttggattgtttgcattacttacttacaacacactgatccaaaggttcctcacttcagagacaacgaatggaattttcaaagaggtgccgcttgtaccatcgatagatccttcggtactattgtcaaccacttgcaccaccacatcggcgattcccaccaatgtcaccacatgttctctcaaatgccattctacaatgctgtcgaagctactaagtatctaaaggccaagctaggtaagtactacatcttcgacgacactccaattgccaaggctttgtacagaaactggagagaatgtaaattcgtcgaagacgaaggtgatgttgttttctacaagcactaa

SEQ ID NO: 456 - DNA, 1212 bp, Artificial sequence
  Delta-15 Desaturase
atggcccctccacacgtcgtcgacgaacaagttagaagaagaatcgttgttgaagacgagattaagtcaaagaaacaattcgagagaaactacgtcccaatggatttcactatcaaggaaatcagagacgctatccctgctcacttattcatcagagacacaactaagtcaattctacacgttgtcaaagatttggttaccattgccattgttttctactgtgctaccttcatcgaaactttgccatccttggctttgagagttccagcatggatcacctactggattattcaaggtaccgtcatggttggtccatggattttggctcacgaatgtggtcacggtgccttttctgattccaagactatcaacactattttcggttgggtcttgcattccgctttgttggttccttatcaggcatgggcaatgtcacactctaagcaccacaagggtactggttccatggcgaaggatttcgtcttcattccagctactcgttcctacaaaggtctacctgccctagaaaagcctgctgttgaagaagaagtttctgaacaagaacatcaccaccatgaagaatccatctttgctgaaaccccaatctacactttgggtgccttgttgttcgttttaaccttcggttggccattgtacctaattgttaacttctctggtcacgaagccccacactgggtcaaccacttccaaactgttgctccattgtacgaaccacaccaaagaaagaacatcttttactctaactgtggtattgttgctatgggctctattttgacctatttgtccatggttttctctccattaactgttttcatgtactacggtatcccatacttgggtgttaatgcttggattgtttgcattacttacttacaacacactgatccaaaggttcctcacttcagagacaacgaatggaattttcaaagaggtgccgcttgtaccatcgatagatccttcggtactattgtcaaccacttgcaccaccacatcggcgattcccaccaatgtcaccacatgttctctcaaatgccattctacaatgctgtcgaagctactaagtatctaaaggccaagctaggtaagtactacatcttcgacgacactccaattgccaaggctttgtacagaaactggagagaatgtaaattcgtcgaagacgaaggtgatgttgttttctacaagcactaa

SEQ ID NO: 457 - DNA, 1212 bp, Artificial sequence
  Delta-15 Desaturase
atggcccctccacacgtcgtcgacgaacaagttagaagaagaatcgttgttgaagacgagattaagtcaaagaaacaattcgagagaaactacgtcccaatggatttcactatcaaggaaatcagagacgctatccctgctcacttattcatcagagacacaactaagtcaattctacacgttgtcaaagatttggttaccattgccattgttttctactgtgctaccttcatcgaaactttgccatccttggctttgagagttccagcatggatcacctactggattattcaaggtaccgtcatggttggtccatggattttggctcacgaatgtggtcacggtgccttttctgattccaagactatcaacactattttcggttgggtcttgcattccgctttgttggttccttatcaggcatgggcaatgtcacactctaagcaccacaagggtactggttccatgtcgaaggatttcgtcttcattccagctactcgttcctacaaaggtctacctgccctagaaaagcctgctgttgaagaagaagtttctgaacaagaacatcaccaccatgaagaatccatctttgctgaaaccccaatctacactttgggtgccttgttgttcgttttaaccttcggttggccattgtacctaattgttaacttctctggtcacgaagccccacactgggtcaaccacttccaaactgttgctccattgtacgaaccacaccaaagaaagaacatcttttactctaactgtggtattgttgctatgggctctattttgacctatttgtccatggttttctctccattaactgttttcatgtactacggtatcccatacttgggtgttaatgcttggattgtttgcattacttacttacaacacactgatccaaaggttcctcacttcagagacaacgaatggaattttcaaagaggtgccgcttgtaccatcgatagatccttcggtactattgtcaaccacttgcaccaccacatcggcgattcccaccaatgtcaccacatgttctctcaaatgccattctacaatgctgtcgaagctactaagtatctaaaggccaagctaggtaagtactacatcttcgacgacactccaattgccaaggctttgtacagaaactggagagaatgtaaattcgtcgaagacgaaggtgatgttgttttctacaagcactaa

SEQ ID NO: 458 - DNA, 1212 bp, Artificial sequence
  Delta-15 Desaturase
atggcccctccacacgtcgtcgacgaacaagttagaagaagaatcgttgttgaagacgagattaagtcaaagaaacaattcgagagaaactacgtcccaatggatttcactatcaaggaaatcagagacgctatccctgctcacttattcatcagagacacaactaagtcaattctacacgttgtcaaagatttggttaccattgccattgttttctactgtgctaccttcatcgaaactttgccatccttggctttgagagttccagcatggatcacctactggattattcaaggtaccgtcatggttggtccatggattttggctcacgaatgtggtcacggtgccttttctgattccaagactatcaacactattttcggttgggtcttgcattccgctttgttggttccttatcaggcatgggcaatgtcacactctaagcaccacaagggtactggttccatgaagaaggatctcgtcttcattccagctactcgttcctacaaaggtctacctgccctagaaaagcctgctgttgaagaagaagtttctgaacaagaacatcaccaccatgaagaatccatctttgctgaaaccccaatctacactttgggtgccttgttgttcgttttaaccttcggttggccattgtacctaattgttaacttctctggtcacgaagccccacactgggtcaaccacttccaaactgttgctccattgtacgaaccacaccaaagaaagaacatcttttactctaactgtggtattgttgctatgggctctattttgacctatttgtccatggttttctctccattaactgttttcatgtactacggtatcccatacttgggtgttaatgcttggattgtttgcattacttacttacaacacactgatccaaaggttcctcacttcagagacaacgaatggaattttcaaagaggtgccgcttgtaccatcgatagatccttcggtactattgtcaaccacttgcaccaccacatcggcgattcccaccaatgtcaccacatgttctctcaaatgccattctacaatgctgtcgaagctactaagtatctaaaggccaagctaggtaagtactacatcttcgacgacactccaattgccaaggctttgtacagaaactggagagaatgtaaattcgtcgaagacgaaggtgatgttgttttctacaagcactaa

SEQ ID NO: 459 - DNA, 1212 bp, Artificial sequence
  Delta-15 Desaturase
atggcccctccacacgtcgtcgacgaacaagttagaagaagaatcgttgttgaagacgagattaagtcaaagaaacaattcgagagaaactacgtcccaatggatttcactatcaaggaaatcagagacgctatccctgctcacttattcatcagagacacaactaagtcaattctacacgttgtcaaagatttggttaccattgccattgttttctactgtgctaccttcatcgaaactttgccatccttggctttgagagttccagcatggatcacctactggattattcaaggtaccgtcatggttggtccatggattttggctcacgaatgtggtcacggtgccttttctgattccaagactatcaacactattttcggttgggtcttgcattccgctttgttggttccttatcaggcatgggcaatgtcacactctaagcaccacaagggtactggttccatgaagaaggatatggtcttcattccagctactcgttcctacaaatgtctacctgccctagaaaagcctgctgttgaagaagaagtttctgaacaagaacatcaccaccatgaagaatccatctttgctgaaaccccaatctacactttgggtgccttgttgttcgttttaaccttcggttggccattgtacctaattgttaacttctctggtcacgaagccccacactgggtcaaccacttccaaactgttgctccattgtacgaaccacaccaaagaaagaacatcttttactctaactgtggtattgttgctatgggctctattttgacctatttgtccatggttttctctccattaactgttttcatgtactacggtatcccatacttgggtgttaatgcttggattgtttgcattacttacttacaacacactgatccaaaggttcctcacttcagagacaacgaatggaattttcaaagaggtgccgcttgtaccatcgatagatccttcggtactattgtcaaccacttgcaccaccacatcggcgattcccaccaatgtcaccacatgttctctcaaatgccattctacaatgctgtcgaagctactaagtatctaaaggccaagctaggtaagtactacatcttcgacgacactccaattgccaaggctttgtacagaaactggagagaatgtaaattcgtcgaagacgaaggtgatgttgttttctacaagcactaa

SEQ ID NO: 460 - DNA, 1212 bp, Artificial sequence
  Delta-15 Desaturase
atggcccctccacacgtcgtcgacgaacaagttagaagaagaatcgttgttgaagacgagattaagtcaaagaaacaattcgagagaaactacgtcccaatggatttcactatcaaggaaatcagagacgctatccctgctcacttattcatcagagacacaactaagtcaattctacacgttgtcaaagatttggttaccattgccattgttttctactgtgctaccttcatcgaaactttgccatccttggctttgagagttccagcatggatcacctactggattattcaaggtaccgtcatggttggtccatggattttggctcacgaatgtggtcacggtgccttttctgattccaagactatcaacactattttcggttgggtcttgcattccgctttgttggttccttatcaggcatgggcaatgtcacactctaagcaccacaagggtactggttccatggcgaaggatgtggtcttcattccagctactcgttcctacaaaggtctacctgccctagaaaagcctgctgttgaagaagaagtttctgaacaagaacatcaccaccatgaagaatccatctttgctgaaaccccaatctacactttgggtgccttgttgttcgttttaaccttcggttggccattgtacctaattgttaacttctctggtcacgaagccccacactgggtcaaccacttccaaactgttgctccattgtacgaaccacaccaaagaaagaacatcttttactctaactgtggtattgttgctatgggctctattttgacctatttgtccatggttttctctccattaactgttttcatgtactacggtatcccatacttgggtgttaatgcttggattgtttgcattacttacttacaacacactgatccaaaggttcctcacttcagagacaacgaatggaattttcaaagaggtgccgcttgtaccatcgatagatccttcggtactattgtcaaccacttgcaccaccacatcggcgattcccaccaatgtcaccacatgttctctcaaatgccattctacaatgctgtcgaagctactaagtatctaaaggccaagctaggtaagtactacatcttcgacgacactccaattgccaaggctttgtacagaaactggagagaatgtaaattcgtcgaagacgaaggtgatgttgttttctacaagcactaa

SEQ ID NO: 461 - DNA, 1212 bp, Artificial sequence
  Delta-15 Desaturase
atggcccctccacacgtcgtcgacgaacaagttagaagaagaatcgttgttgaagacgagattaagtcaaagaaacaattcgagagaaactacgtcccaatggatttcactatcaaggaaatcagagacgctatccctgctcacttattcatcagagacacaactaagtcaattctacacgttgtcaaagatttggttaccattgccattgttttctactgtgctaccttcatcgaaactttgccatccttggctttgagagttccagcatggatcacctactggattattcaaggtaccgtcatggttggtccatggattttggctcacgaatgtggtcacggtgccttttctgattccaagactatcaacactattttcggttgggtcttgcattccgctttgttggttccttatcaggcatgggcaatgtcacactctaagcaccacaagggtactggttccatgacgaaggatctcgtcttcattccagctactcgttcctacaaaggtctacctgccctagaaaagcctgctgttgaagaagaagtttctgaacaagaacatcaccaccatgaagaatccatctttgctgaaaccccaatctacactttgggtgccttgttgttcgttttaaccttcggttggccattgtacctaattgttaacttctctggtcacgaagccccacactgggtcaaccacttccaaactgttgctccattgtacgaaccacaccaaagaaagaacatcttttactctaactgtggtattgttgctatgggctctattttgacctatttgtccatggttttctctccattaactgttttcatgtactacggtatcccatacttgggtgttaatgcttggattgtttgcattacttacttacaacacactgatccaaaggttcctcacttcagagacaacgaatggaattttcaaagaggtgccgcttgtaccatcgatagatccttcggtactattgtcaaccacttgcaccaccacatcggcgattcccaccaatgtcaccacatgttctctcaaatgccattctacaatgctgtcgaagctactaagtatctaaaggccaagctaggtaagtactacatcttcgacgacactccaattgccaaggctttgtacagaaactggagagaatgtaaattcgtcgaagacgaaggtgatgttgttttctacaagcactaa

SEQ ID NO: 462 - DNA, 1212 bp, Artificial sequence
  Delta-15 Desaturase
atggcccctccacacgtcgtcgacgaacaagttagaagaagaatcgttgttgaagacgagattaagtcaaagaaacaattcgagagaaactacgtcccaatggatttcactatcaaggaaatcagagacgctatccctgctcacttattcatcagagacacaactaagtcaattctacacgttgtcaaagatttggttaccattgccattgttttctactgtgctaccttcatcgaaactttgccatccttggctttgagagttccagcatggatcacctactggattattcaaggtaccgtcatggttggtccatggattttggctcacgaatgtggtcacggtgccttttctgattccaagactatcaacactattttcggttgggtcttgcattccgctttgttggttccttatcaggcatgggcaatgtcacactctaagcaccacaagggtactggttccatggagaaggatatcgtcttcattccagctactcgttcctacaaaggtctacctgccctagaaaagcctgctgttgaagaagaagtttctgaacaagaacatcaccaccatgaagaatccatctttgctgaaaccccaatctacactttgggtgccttgttgttcgttttaaccttcggttggccattgtacctaattgttaacttctctggtcacgaagccccacactgggtcaaccacttccaaactgttgctccattgtacgaaccacaccaaagaaagaacatcttttactctaactgtggtattgttgctatgggctctattttgacctatttgtccatggttttctctccattaactgttttcatgtactacggtatcccatacttgggtgttaatgcttggattgtttgcattacttacttacaacacactgatccaaaggttcctcacttcagagacaacgaatggaattttcaaagaggtgccgcttgtaccatcgatagatccttcggtactattgtcaaccacttgcaccaccacatcggcgattcccaccaatgtcaccacatgttctctcaaatgccattctacaatgctgtcgaagctactaagtatctaaaggccaagctaggtaagtactacatcttcgacgacactccaattgccaaggctttgtacagaaactggagagaatgtaaattcgtcgaagacgaaggtgatgttgttttctacaagcactaa

SEQ ID NO: 463 - DNA, 1212 bp, Artificial sequence
  Delta-15 Desaturase
atggcccctccacacgtcgtcgacgaacaagttagaagaagaatcgttgttgaagacgagattaagtcaaagaaacaattcgagagaaactacgtcccaatggatttcactatcaaggaaatcagagacgctatccctgctcacttattcatcagagacacaactaagtcaattctacacgttgtcaaagatttggttaccattgccattgttttctactgtgctaccttcatcgaaactttgccatccttggctttgagagttccagcatggatcacctactggattattcaaggtaccgtcatggttggtccatggattttggctcacgaatgtggtcacggtgccttttctgattccaagactatcaacactattttcggttgggtcttgcattccgctttgttggttccttatcaggcatgggcaatgtcacactctaagcaccacaagggtactggttccatgaagaaggatatcgtcttcattccagctactcgttcctacaaaggtctacctgccctagaaaagcctgctgttgaagaagaagtttctgaacaagaacatcaccaccatgaagaatccatctttgctgaaaccccaatctacactttgggtgccttgttgttcgttttaaccttcggttggccattgtacctaattgttaacttctctggtcacgaagccccacactgggtcaaccacttccaaactgttgctccattgtacgaaccacaccaaagaaagaacatcttttactctaactgtggtattgttgctatgggctctattttgacctatttgtccatggttttctctccattaactgttttcatgtactacggtatcccatacttgggtgttaatgcttggattgtttgcattacttacttacaacacactgatccaaaggttcctcacttcagagacaacgaatggaattttcaaagaggtgccgcttgtaccatcgatagatccttcggtactattgtcaaccacttgcaccaccacatcggcgattcccaccaatgtcaccacatgttctctcaaatgccattctacaatgctgtcgaagctactaagtatctaaaggccaagctaggtaagtactacatcttcgacgacactccaattgccaaggctttgtacagaaactggagagaatgtaaattcgtcgaagacgaaggtgatgttgttttctacaagcactaa

SEQ ID NO: 464 - DNA, 1212 bp, Artificial sequence
  Delta-15 Desaturase
atggcccctccacacgtcgtcgacgaacaagttagaagaagaatcgttgttgaagacgagattaagtcaaagaaacaattcgagagaaactacgtcccaatggatttcactatcaaggaaatcagagacgctatccctgctcacttattcatcagagacacaactaagtcaattctacacgttgtcaaagatttggttaccattgccattgttttctactgtgctaccttcatcgaaactttgccatccttggctttgagagttccagcatggatcacctactggattattcaaggtaccgtcatggttggtccatggattttggctcacgaatgtggtcacggtgccttttctgattccaagactatcaacactattttcggttgggtcttgcattccgctttgttggttccttatcaggcatgggcaatgtcacactctaagcaccacaagggtactggttccatgacgaaggatctggtcttcattccagctactcgttcctacaaaggtctacctgccctagaaaagcctgctgttgaagaagaagtttctgaacaagaacatcaccaccatgaagaatccatctttgctgaaaccccaatctacactttgggtgccttgttgttcgttttaaccttcggttggccattgtacctaattgttaacttctctggtcacgaagccccacactgggtcaaccacttccaaactgttgctccattgtacgaaccacaccaaagaaagaacatcttttactctaactgtggtattgttgctatgggctctattttgacctatttgtccatggttttctctccattaactgttttcatgtactacggtatcccatacttgggtgttaatgcttggattgtttgcattacttacttacaacacactgatccaaaggttcctcacttcagagacaacgaatggaattttcaaagaggtgccgcttgtaccatcgatagatccttcggtactattgtcaaccacttgcaccaccacatcggcgattcccaccaatgtcaccacatgttctctcaaatgccattctacaatgctgtcgaagctactaagtatctaaaggccaagctaggtaagtactacatcttcgacgacactccaattgccaaggctttgtacagaaactggagagaatgtaaattcgtcgaagacgaaggtgatgttgttttctacaagcactaa

SEQ ID NO: 465 - DNA, 1212 bp, Artificial sequence
  Delta-15 Desaturase
atggcccctccacacgtcgtcgacgaacaagttagaagaagaatcgttgttgaagacgagattaagtcaaagaaacaattcgagagaaactacgtcccaatggatttcactatcaaggaaatcagagacgctatccctgctcacttattcatcagagacacaactaagtcaattctacacgttgtcaaagatttggttaccattgccattgttttctactgtgctaccttcatcgaaactttgccatccttggctttgagagttccagcatggatcacctactggattattcaaggtaccgtcatggttggtccatggattttggctcacgaatgtggtcacggtgccttttctgattccaagactatcaacactattttcggttgggtcttgcattccgctttgttggttccttatcaggcatgggcaatgtcacactctaagcaccacaagggtactggttctatgtcgaaggatttcgtcttcattccagctactcgttcctacaaaggtctacctgccctagaaaagcctgctgttgaagaagaagtttctgaacaagaacatcaccaccatgaagaatccatctttgctgaaaccccaatctacactttgggtgccttgttgttcgttttaaccttcggttggccattgtacctaattgttaacttctctggtcacgaagccccacactgggtcaaccacttccaaactgttgctccattgtacgaaccacaccaaagaaagaacatcttttactctaactgtggtattgttgctatgggctctattttgacctatttgtccatggttttctctccattaactgttttcatgtactacggtatcccatacttgggtgttaatgcttggattgtttgcattacttacttacaacacactgatccaaaggttcctcacttcagagacaacgaatggaattttcaaagaggtgccgcttgtaccatcgatagatccttcggtactattgtcaaccacttgcaccaccacatcggcgattcccaccaatgtcaccacatgttctctcaaatgccattctacaatgctgtcgaagctactaagtatctaaaggccaagctaggtaagtactacatcttcgacgacactccaattgccaaggctttgtacagaaactggagagaatgtaaattcgtcgaagacgaaggtgatgttgttttctacaagcactaa

SEQ ID NO: 466 - DNA, 1212 bp, Artificial sequence
  Delta-15 Desaturase
atggcccctccacacgtcgtcgacgaacaagttagaagaagaatcgttgttgaagacgagattaagtcaaagaaacaattcgagagaaactacgtcccaatggatttcactatcaaggaaatcagagacgctatccctgctcacttattcatcagagacacaactaagtcaattctacacgttgtcaaagatttggttaccattgccattgttttctactgtgctaccttcatcgaaactttgccatccttggctttgagagttccagcatggatcacctactggattattcaaggtaccgtcatggttggtccatggattttggctcacgaatgtggtcacggtgccttttctgattccaagactatcaacactattttcggttgggtcttgcattccgctttgttggttccttatcaggcatgggcaatgtcacactctaagcaccacaagggtactggttccatgacgaaggatatggtcttcattccagctactcgttcctacaaaggtctacctgccctagaaaagcctgctgttgaagaagaagtttctgaacaagaacatcaccaccatgaagaatccatctttgctgaaaccccaatctacactttgggtgccttgttgttcgttttaaccttcggttggccattgtacctaattgttaacttctctggtcacgaagccccacactgggtcaaccacttccaaactgttgctccattgtacgaaccacaccaaagaaagaacatcttttactctaactgtggtattgttgctatgggctctattttgacctatttgtccatggttttctctccattaactgttttcatgtactacggtatcccatacttgggtgttaatgcttggattgtttgcattacttacttacaacacactgatccaaaggttcctcacttcagagacaacgaatggaattttcaaagaggtgccgcttgtaccatcgatagatccttcggtactattgtcaaccacttgcaccaccacatcggcgattcccaccaatgtcaccacatgttctctcaaatgccattctacaatgctgtcgaagctactaagtatctaaaggccaagctaggtaagtactacatcttcgacgacactccaattgccaaggctttgtacagaaactggagagaatgtaaattcgtcgaagacgaaggtgatgttgttttctacaagcactaa

SEQ ID NO: 467 - DNA, 1212 bp, Artificial sequence
  Delta-15 Desaturase
atggcccctccacacgtcgtcgacgaacaagttagaagaagaatcgttgttgaagacgagattaagtcaaagaaacaattcgagagaaactacgtcccaatggatttcactatcaaggaaatcagagacgctatccctgctcacttattcatcagagacacaactaagtcaattctacacgttgtcaaagatttggttaccattgccattgttttctactgtgctaccttcatcgaaactttgccatccttggctttgagagttccagcatggatcacctactggattattcaaggtaccgtcatggttggtccatggattttggctcacgaatgtggtcacggtgccttttctgattccaagactatcaacactattttcggttgggtcttgcattccgctttgttggttccttatcaggcatgggcaatgtcacactctaagcaccacaagggtactggttccatggcgaaggatctcgtcttcattccagctactcgttcctacaaaggtctacctgccctagaaaagcctgctgttgaagaagaagtttctgaacaagaacatcaccaccatgaagaatccatctttgctgaaaccccaatctacactttgggtgccttgttgttcgttttaaccttcggttggccattgtacctaattgttaacttctctggtcacgaagccccacactgggtcaaccacttccaaactgttgctccattgtacgaaccacaccaaagaaagaacatcttttactctaactgtggtattgttgctatgggctctattttgacctatttgtccatggttttctctccattaactgttttcatgtactacggtatcccatacttgggtgttaatgcttggattgtttgcattacttacttacaacacactgatccaaaggttcctcacttcagagacaacgaatggaattttcaaagaggtgccgcttgtaccatcgatagatccttcggtactattgtcaaccacttgcaccaccacatcggcgattcccaccaatgtcaccacatgttctctcaaatgccattctacaatgctgtcgaagctactaagtatctaaaggccaagctaggtaagtactacatcttcgacgacactccaattgccaaggctttgtacagaaactggagagaatgtaaattcgtcgaagacgaaggtgatgttgttttctacaagcactaa

SEQ ID NO: 468 - DNA, 1212 bp, Artificial sequence
  Delta-15 Desaturase
atggcccctccacacgtcgtcgacgaacaagttagaagaagaatcgttgttgaagacgagattaagtcaaagaaacaattcgagagaaactacgtcccaatggatttcactatcaaggaaatcagagacgctatccctgctcacttattcatcagagacacaactaagtcaattctacacgttgtcaaagatttggttaccattgccattgttttctactgtgctaccttcatcgaaactttgccatccttggctttgagagttccagcatggatcacctactggattattcaaggtaccgtcatggttggtccatggattttggctcacgaatgtggtcacggtgccttttctgattccaagactatcaacactattttcggttgggtcttgcattccgctttgttggttccttatcaggcatgggcaatgtcacactctaagcaccacaagggtactggttccatggagaaggatgtcgtcttcattccagctactcgttcctacaaaggtctacctgccctagaaaagcctgctgttgaagaagaagtttctgaacaagaacatcaccaccatgaagaatccatctttgctgaaaccccaatctacactttgggtgccttgttgttcgttttaaccttcggttggccattgtacctaattgttaacttctctggtcacgaagccccacactgggtcaaccacttccaaactgttgctccattgtacgaaccacaccaaagaaagaacatcttttactctaactgtggtattgttgctatgggctctattttgacctatttgtccatggttttctctccattaactgttttcatgtactacggtatcccatacttgggtgttaatgcttggattgtttgcattacttacttacaacacactgatccaaaggttcctcacttcagagacaacgaatggaattttcaaagaggtgccgcttgtaccatcgatagatccttcggtactattgtcaaccacttgcaccaccacatcggcgattcccaccaatgtcaccacatgttctctcaaatgccattctacaatgctgtcgaagctactaagtatctaaaggccaagctaggtaagtactacatcttcgacgacactccaattgccaaggctttgtacagaaactggagagaatgtaaattcgtcgaagacgaaggtgatgttgttttctacaagcactaa

SEQ ID NO: 469 - DNA, 1212 bp, Artificial sequence
  Delta-15 Desaturase
atggcccctccacacgtcgtcgacgaacaagttagaagaagaatcgttgttgaagacgagattaagtcaaagaaacaattcgagagaaactacgtcccaatggatttcactatcaaggaaatcagagacgctatccctgctcacttattcatcagagacacaactaagtcaattctacacgttgtcaaagatttggttaccattgccattgttttctactgtgctaccttcatcgaaactttgccatccttggctttgagagttccagcatggatcacctactggattattcaaggtaccgtcatggttggtccatggattttggctcacgaatgtggtcacggtgccttttctgattccaagactatcaacactattttcggttgggtcttgcattccgctttgttggttccttatcaggcatgggcaatgtcacactctaagcaccacaagggtactggttccatgtcgaaggatgtggtcttcattccagctactcgttcctacaaaggtctacctgccctagaaaagcctgctgttgaagaagaagtttctgaacaagaacatcaccaccatgaagaatccatctttgctgaaaccccaatctacactttgggtgccttgttgttcgttttaaccttcggttggccattgtacctaattgttaacttctctggtcacgaagccccacactgggtcaaccacttccaaactgttgctccattgtacgaaccacaccaaagaaagaacatcttttactctaactgtggtattgttgctatgggctctattttgacctatttgtccatggttttctctccattaactgttttcatgtactacggtatcccatacttgggtgttaatgcttggattgtttgcattacttacttacaacacactgatccaaaggttcctcacttcagagacaacgaatggaattttcaaagaggtgccgcttgtaccatcgatagatccttcggtactattgtcaaccacttgcaccaccacatcggcgattcccaccaatgtcaccacatgttctctcaaatgccattctacaatgctgtcgaagctactaagtatctaaaggccaagctaggtaagtactacatcttcgacgacactccaattgccaaggctttgtacagaaactggagagaatgtaaattcgtcgaagacgaaggtgatgttgttttctacaagcactaa

SEQ ID NO: 470 - DNA, 1212 bp, Artificial sequence
  Delta-15 Desaturase
atggcccctccacacgtcgtcgacgaacaagttagaagaagaatcgttgttgaagacgagattaagtcaaagaaacaattcgagagaaactacgtcccaatggatttcactatcaaggaaatcagagacgctatccctgctcacttattcatcagagacacaactaagtcaattctacacgttgtcaaagatttggttaccattgccattgttttctactgtgctaccttcatcgaaactttgccatccttggctttgagagttccagcatggatcacctactggattattcaaggtaccgtcatggttggtccatggattttggctcacgaatgtggtcacggtgccttttctgattccaagactatcaacactattttcggttgggtcttgcattccgctttgttggttccttatcaggcatgggcaatgtcacactctaagcaccacaagggtactggttccatggagaaggatctcgtcttcattccagctactcgttcctacaaaggtctacctgccctagaaaagcctgctgttgaagaagaagtttctgaacaagaacatcaccaccatgaagaatccatctttgctgaaaccccaatctacactttgggtgccttgttgttcgttttaaccttcggttggccattgtacctaattgttaacttctctggtcacgaagccccacactgggtcaaccacttccaaactgttgctccattgtacgaaccacaccaaagaaagaacatcttttactctaactgtggtattgttgctatgggctctattttgacctatttgtccatggttttctctccattaactgttttcatgtactacggtatcccatacttgggtgttaatgcttggattgtttgcattacttacttacaacacactgatccaaaggttcctcacttcagagacaacgaatggaattttcaaagaggtgccgcttgtaccatcgatagatccttcggtactattgtcaaccacttgcaccaccacatcggcgattcccaccaatgtcaccacatgttctctcaaatgccattctacaatgctgtcgaagctactaagtatctaaaggccaagctaggtaagtactacatcttcgacgacactccaattgccaaggctttgtacagaaactggagagaatgtaaattcgtcgaagacgaaggtgatgttgttttctacaagcactaa

SEQ ID NO: 471 - DNA, 1212 bp, Artificial sequence
  Delta-15 Desaturase
atggcccctccacacgtcgtcgacgaacaagttagaagaagaatcgttgttgaagacgagattaagtcaaagaaacaattcgagagaaactacgtcccaatggatttcactatcaaggaaatcagagacgctatccctgctcacttattcatcagagacacaactaagtcaattctacacgttgtcaaagatttggttaccattgccattgttttctactgtgctaccttcatcgaaactttgccatccttggctttgagagttccagcatggatcacctactggattattcaaggtaccgtcatggttggtccatggattttggctcacgaatgtggtcacggtgccttttctgagcccaagtcgttcaactacattatcggttgggtcttgcattccgctttgttggttccttatcaggcatgggcaatgtcacactctaagcaccacaagggtactggttccatgactaaggatgttgtcttcattccagctactcgttcctacaaaggtctacctgccctagaaaagcctgctgttgaagaagaagtttctgaacaagaacatcaccaccatgaagaatccatctttgctgaaaccccaatctacactttgggtgccttgttgttcgttttaaccttcggttggccattgtacctaattgttaacttctctggtcacgaagccccacactgggtcaaccacttccaaactgttgctccattgtacgaaccacaccaaagaaagaacatcttttactctaactgtggtattgttgctatgggctctattttgacctatttgtccatggttttctctccattaactgttttcatgtactacggtatcccatacttgggtgttaatgcttggattgtttgcattacttacttacaacacactgatccaaaggttcctcacttcagagacaacgaatggaattttcaaagaggtgccgcttgtaccatcgatagatccttcggtactattgtcaaccacttgcaccaccacatcggcgattcccaccaatgtcaccacatgttctctcaaatgccattctacaatgctgtcgaagctactaagtatctaaaggccaagctaggtaagtactacatcttcgacgacactccaattgccaaggctttgtacagaaactggagagaatgtaaattcgtcgaagacgaaggtgatgttgttttctacaagcactaa

SEQ ID NO: 472 - DNA, 1212 bp, Artificial sequence
  Delta-15 Desaturase
atggcccctccacacgtcgtcgacgaacaagttagaagaagaatcgttgttgaagacgagattaagtcaaagaaacaattcgagagaaactacgtcccaatggatttcactatcaaggaaatcagagacgctatccctgctcacttattcatcagagacacaactaagtcaattctacacgttgtcaaagatttggttaccattgccattgttttctactgtgctaccttcatcgaaactttgccatccttggctttgagagttccagcatggatcacctactggattattcaaggtaccgtcatggttggtccatggattttggctcacgaatgtggtcacggtgccttttctaaacccaagacgttcaacaccattttgggttgggtcttgcattccgctttgttggttccttatcaggcatgggcaatgtcacactctaagcaccacaagggtactggttccatgactaaggatgttgtcttcattccagctactcgttcctacaaaggtctacctgccctagaaaagcctgctgttgaagaagaagtttctgaacaagaacatcaccaccatgaagaatccatctttgctgaaaccccaatctacactttgggtgccttgttgttcgttttaaccttcggttggccattgtacctaattgttaacttctctggtcacgaagccccacactgggtcaaccacttccaaactgttgctccattgtacgaaccacaccaaagaaagaacatcttttactctaactgtggtattgttgctatgggctctattttgacctatttgtccatggttttctctccattaactgttttcatgtactacggtatcccatacttgggtgttaatgcttggattgtttgcattacttacttacaacacactgatccaaaggttcctcacttcagagacaacgaatggaattttcaaagaggtgccgcttgtaccatcgatagatccttcggtactattgtcaaccacttgcaccaccacatcggcgattcccaccaatgtcaccacatgttctctcaaatgccattctacaatgctgtcgaagctactaagtatctaaaggccaagctaggtaagtactacatcttcgacgacactccaattgccaaggctttgtacagaaactggagagaatgtaaattcgtcgaagacgaaggtgatgttgttttctacaagcactaa

SEQ ID NO: 473 - DNA, 1212 bp, Artificial sequence
  Delta-15 Desaturase
atggcccctccacacgtcgtcgacgaacaagttagaagaagaatcgttgttgaagacgagattaagtcaaagaaacaattcgagagaaactacgtcccaatggatttcactatcaaggaaatcagagacgctatccctgctcacttattcatcagagacacaactaagtcaattctacacgttgtcaaagatttggttaccattgccattgttttctactgtgctaccttcatcgaaactttgccatccttggctttgagagttccagcatggatcacctactggattattcaaggtaccgtcatggttggtccatggattttggctcacgaatgtggtcacggtgccttttctgatcccaggtcgttcaacaacattttgggttgggtcttgcattccgctttgttggttccttatcaggcatgggcaatgtcacactctaagcaccacaagggtactggttccatgactaaggatgttgtcttcattccagctactcgttcctacaaaggtctacctgccctagaaaagcctgctgttgaagaagaagtttctgaacaagaacatcaccaccatgaagaatccatctttgctgaaaccccaatctacactttgggtgccttgttgttcgttttaaccttcggttggccattgtacctaattgttaacttctctggtcacgaagccccacactgggtcaaccacttccaaactgttgctccattgtacgaaccacaccaaagaaagaacatcttttactctaactgtggtattgttgctatgggctctattttgacctatttgtccatggttttctctccattaactgttttcatgtactacggtatcccatacttgggtgttaatgcttggattgtttgcattacttacttacaacacactgatccaaaggttcctcacttcagagacaacgaatggaattttcaaagaggtgccgcttgtaccatcgatagatccttcggtactattgtcaaccacttgcaccaccacatcggcgattcccaccaatgtcaccacatgttctctcaaatgccattctacaatgctgtcgaagctactaagtatctaaaggccaagctaggtaagtactacatcttcgacgacactccaattgccaaggctttgtacagaaactggagagaatgtaaattcgtcgaagacgaaggtgatgttgttttctacaagcactaa

SEQ ID NO: 474 - DNA, 1212 bp, Artificial sequence
  Delta-15 Desaturase
atggcccctccacacgtcgtcgacgaacaagttagaagaagaatcgttgttgaagacgagattaagtcaaagaaacaattcgagagaaactacgtcccaatggatttcactatcaaggaaatcagagacgctatccctgctcacttattcatcagagacacaactaagtcaattctacacgttgtcaaagatttggttaccattgccattgttttctactgtgctaccttcatcgaaactttgccatccttggctttgagagttccagcatggatcacctactggattattcaaggtaccgtcatggttggtccatggattttggctcacgaatgtggtcacggtgccttttctcatcccaggaggatcaactccattatgggttgggtcttgcattccgctttgttggttccttatcaggcatgggcaatgtcacactctaagcaccacaagggtactggttccatgactaaggatgttgtcttcattccagctactcgttcctacaaaggtctacctgccctagaaaagcctgctgttgaagaagaagtttctgaacaagaacatcaccaccatgaagaatccatctttgctgaaaccccaatctacactttgggtgccttgttgttcgttttaaccttcggttggccattgtacctaattgttaacttctctggtcacgaagccccacactgggtcaaccacttccaaactgttgctccattgtacgaaccacaccaaagaaagaacatcttttactctaactgtggtattgttgctatgggctctattttgacctatttgtccatggttttctctccattaactgttttcatgtactacggtatcccatacttgggtgttaatgcttggattgtttgcattacttacttacaacacactgatccaaaggttcctcacttcagagacaacgaatggaattttcaaagaggtgccgcttgtaccatcgatagatccttcggtactattgtcaaccacttgcaccaccacatcggcgattcccaccaatgtcaccacatgttctctcaaatgccattctacaatgctgtcgaagctactaagtatctaaaggccaagctaggtaagtactacatcttcgacgacactccaattgccaaggctttgtacagaaactggagagaatgtaaattcgtcgaagacgaaggtgatgttgttttctacaagcactaa

SEQ ID NO: 475 - DNA, 1212 bp, Artificial sequence
  Delta-15 Desaturase
atggcccctccacacgtcgtcgacgaacaagttagaagaagaatcgttgttgaagacgagattaagtcaaagaaacaattcgagagaaactacgtcccaatggatttcactatcaaggaaatcagagacgctatccctgctcacttattcatcagagacacaactaagtcaattctacacgttgtcaaagatttggttaccattgccattgttttctactgtgctaccttcatcgaaactttgccatccttggctttgagagttccagcatggatcacctactggattattcaaggtaccgtcatggttggtccatggattttggctcacgaatgtggtcacggtgccttttctgattccaagactatcaacactattttcggttgggtcttgcattccgctttgttggttccttatcaggcatgggcaatgtcacactctaagcaccacaaggttactggtcatatgactaaggatgttgtcttcattccagctactcgttcctacaaaggtctacctgccctagaaaagcctgctgttgaagaagaagtttctgaacaagaacatcaccaccatgaagaatccatctttgctgaaaccccaatctacactttgggtgccttgttgttcgttttaaccttcggttggccattgtacctaattgttaacttctctggtcacgaagccccacactgggtcaaccacttccaaactgttgctccattgtacgaaccacaccaaagaaagaacatcttttactctaactgtggtattgttgctatgggctctattttgacctatttgtccatggttttctctccattaactgttttcatgtactacggtatcccatacttgggtgttaatgcttggattgtttgcattacttacttacaacacactgatccaaaggttcctcacttcagagacaacgaatggaattttcaaagaggtgccgcttgtaccatcgatagatccttcggtactattgtcaaccacttgcaccaccacatcggcgattcccaccaatgtcaccacatgttctctcaaatgccattctacaatgctgtcgaagctactaagtatctaaaggccaagctaggtaagtactacatcttcgacgacactccaattgccaaggctttgtacagaaactggagagaatgtaaattcgtcgaagacgaaggtgatgttgttttctacaagcactaa

SEQ ID NO: 476 - DNA, 1212 bp, Artificial sequence
  Delta-15 Desaturase
atggcccctccacacgtcgtcgacgaacaagttagaagaagaatcgttgttgaagacgagattaagtcaaagaaacaattcgagagaaactacgtcccaatggatttcactatcaaggaaatcagagacgctatccctgctcacttattcatcagagacacaactaagtcaattctacacgttgtcaaagatttggttaccattgccattgttttctactgtgctaccttcatcgaaactttgccatccttggctttgagagttccagcatggatcacctactggattattcaaggtaccgtcatggttggtccatggattttggctcacgaatgtggtcacggtgccttttctgattccaagactatcaacactattttcggttgggtcttgcattccgctttgttggttccttatcaggcatgggcaatgtcacactctaagcaccacaagtgtactggtcgtatgactaaggatgttgtcttcattccagctactcgttcctacaaaggtctacctgccctagaaaagcctgctgttgaagaagaagtttctgaacaagaacatcaccaccatgaagaatccatctttgctgaaaccccaatctacactttgggtgccttgttgttcgttttaaccttcggttggccattgtacctaattgttaacttctctggtcacgaagccccacactgggtcaaccacttccaaactgttgctccattgtacgaaccacaccaaagaaagaacatcttttactctaactgtggtattgttgctatgggctctattttgacctatttgtccatggttttctctccattaactgttttcatgtactacggtatcccatacttgggtgttaatgcttggattgtttgcattacttacttacaacacactgatccaaaggttcctcacttcagagacaacgaatggaattttcaaagaggtgccgcttgtaccatcgatagatccttcggtactattgtcaaccacttgcaccaccacatcggcgattcccaccaatgtcaccacatgttctctcaaatgccattctacaatgctgtcgaagctactaagtatctaaaggccaagctaggtaagtactacatcttcgacgacactccaattgccaaggctttgtacagaaactggagagaatgtaaattcgtcgaagacgaaggtgatgttgttttctacaagcactaa

SEQ ID NO: 477 - DNA, 1212 bp, Artificial sequence
  Delta-15 Desaturase
atggcccctccacacgtcgtcgacgaacaagttagaagaagaatcgttgttgaagacgagattaagtcaaagaaacaattcgagagaaactacgtcccaatggatttcactatcaaggaaatcagagacgctatccctgctcacttattcatcagagacacaactaagtcaattctacacgttgtcaaagatttggttaccattgccattgttttctactgtgctaccttcatcgaaactttgccatccttggctttgagagttccagcatggatcacctactggattattcaaggtaccgtcatggttggtccatggattttggctcacgaatgtggtcacggtgccttttctgattccaagactatcaacactattttcggttgggtcttgcattccgctttgttggttccttatcaggcatgggcaatgtcacactctaagcaccacaagtttactggtactatgactaaggatgttgtcttcattccagctactcgttcctacaaaggtctacctgccctagaaaagcctgctgttgaagaagaagtttctgaacaagaacatcaccaccatgaagaatccatctttgctgaaaccccaatctacactttgggtgccttgttgttcgttttaaccttcggttggccattgtacctaattgttaacttctctggtcacgaagccccacactgggtcaaccacttccaaactgttgctccattgtacgaaccacaccaaagaaagaacatcttttactctaactgtggtattgttgctatgggctctattttgacctatttgtccatggttttctctccattaactgttttcatgtactacggtatcccatacttgggtgttaatgcttggattgtttgcattacttacttacaacacactgatccaaaggttcctcacttcagagacaacgaatggaattttcaaagaggtgccgcttgtaccatcgatagatccttcggtactattgtcaaccacttgcaccaccacatcggcgattcccaccaatgtcaccacatgttctctcaaatgccattctacaatgctgtcgaagctactaagtatctaaaggccaagctaggtaagtactacatcttcgacgacactccaattgccaaggctttgtacagaaactggagagaatgtaaattcgtcgaagacgaaggtgatgttgttttctacaagcactaa

SEQ ID NO: 478 - DNA, 1212 bp, Artificial sequence
  Delta-15 Desaturase
atggcccctccacacgtcgtcgacgaacaagttagaagaagaatcgttgttgaagacgagattaagtcaaagaaacaattcgagagaaactacgtcccaatggatttcactatcaaggaaatcagagacgctatccctgctcacttattcatcagagacacaactaagtcaattctacacgttgtcaaagatttggttaccattgccattgttttctactgtgctaccttcatcgaaactttgccatccttggctttgagagttccagcatggatcacctactggattattcaaggtaccgtcatggttggtccatggattttggctcacgaatgtggtcacggtgccttttctgattccaagactatcaacactattttcggttgggtcttgcattccgctttgttggttccttatcaggcatgggcaatgtcacactctaagcaccacaagtatactggtgctatgactaaggatgttgtcttcattccagctactcgttcctacaaaggtctacctgccctagaaaagcctgctgttgaagaagaagtttctgaacaagaacatcaccaccatgaagaatccatctttgctgaaaccccaatctacactttgggtgccttgttgttcgttttaaccttcggttggccattgtacctaattgttaacttctctggtcacgaagccccacactgggtcaaccacttccaaactgttgctccattgtacgaaccacaccaaagaaagaacatcttttactctaactgtggtattgttgctatgggctctattttgacctatttgtccatggttttctctccattaactgttttcatgtactacggtatcccatacttgggtgttaatgcttggattgtttgcattacttacttacaacacactgatccaaaggttcctcacttcagagacaacgaatggaattttcaaagaggtgccgcttgtaccatcgatagatccttcggtactattgtcaaccacttgcaccaccacatcggcgattcccaccaatgtcaccacatgttctctcaaatgccattctacaatgctgtcgaagctactaagtatctaaaggccaagctaggtaagtactacatcttcgacgacactccaattgccaaggctttgtacagaaactggagagaatgtaaattcgtcgaagacgaaggtgatgttgttttctacaagcactaa

SEQ ID NO: 479 - DNA, 1212 bp, Artificial sequence
  Delta-15 Desaturase
atggcccctccacacgtcgtcgacgaacaagttagaagaagaatcgttgttgaagacgagattaagtcaaagaaacaattcgagagaaactacgtcccaatggatttcactatcaaggaaatcagagacgctatccctgctcacttattcatcagagacacaactaagtcaattctacacgttgtcaaagatttggttaccattgccattgttttctactgtgctaccttcatcgaaactttgccatccttggctttgagagttccagcatggatcacctactggattattcaaggtaccgtcatggttggtccatggattttggctcacgaatgtggtcacggtgccttttctgattccaagactatcaacactattttcggttgggtcttgcattccgctttgttggttccttatcaggcatgggcaatgtcacactctaagcaccacaagtatactggtactatgactaaggatgttgtcttcattccagctactcgttcctacaaaggtctacctgccctagaaaagcctgctgttgaagaagaagtttctgaacaagaacatcaccaccatgaagaatccatctttgctgaaaccccaatctacactttgggtgccttgttgttcgttttaaccttcggttggccattgtacctaattgttaacttctctggtcacgaagccccacactgggtcaaccacttccaaactgttgctccattgtacgaaccacaccaaagaaagaacatcttttactctaactgtggtattgttgctatgggctctattttgacctatttgtccatggttttctctccattaactgttttcatgtactacggtatcccatacttgggtgttaatgcttggattgtttgcattacttacttacaacacactgatccaaaggttcctcacttcagagacaacgaatggaattttcaaagaggtgccgcttgtaccatcgatagatccttcggtactattgtcaaccacttgcaccaccacatcggcgattcccaccaatgtcaccacatgttctctcaaatgccattctacaatgctgtcgaagctactaagtatctaaaggccaagctaggtaagtactacatcttcgacgacactccaattgccaaggctttgtacagaaactggagagaatgtaaattcgtcgaagacgaaggtgatgttgttttctacaagcactaa

SEQ ID NO: 480 - DNA, 1212 bp, Artificial sequence
  Delta-15 Desaturase
atggcccctccacacgtcgtcgacgaacaagttagaagaagaatcgttgttgaagacgagattaagtcaaagaaacaattcgagagaaactacgtcccaatggatttcactatcaaggaaatcagagacgctatccctgctcacttattcatcagagacacaactaagtcaattctacacgttgtcaaagatttggttaccattgccattgttttctactgtgctaccttcatcgaaactttgccatccttggctttgagagttccagcatggatcacctactggattattcaaggtaccgtcatggttggtccatggattttggctcacgaatgtggtcacggtgccttttctgattccaagactatcaacactattttcggttgggtcttgcattccgctttgttggttccttatcaggcatgggcaatgtcacactctaagcaccacaagtttactggtgctatgactaaggatgttgtcttcattccagctactcgttcctacaaaggtctacctgccctagaaaagcctgctgttgaagaagaagtttctgaacaagaacatcaccaccatgaagaatccatctttgctgaaaccccaatctacactttgggtgccttgttgttcgttttaaccttcggttggccattgtacctaattgttaacttctctggtcacgaagccccacactgggtcaaccacttccaaactgttgctccattgtacgaaccacaccaaagaaagaacatcttttactctaactgtggtattgttgctatgggctctattttgacctatttgtccatggttttctctccattaactgttttcatgtactacggtatcccatacttgggtgttaatgcttggattgtttgcattacttacttacaacacactgatccaaaggttcctcacttcagagacaacgaatggaattttcaaagaggtgccgcttgtaccatcgatagatccttcggtactattgtcaaccacttgcaccaccacatcggcgattcccaccaatgtcaccacatgttctctcaaatgccattctacaatgctgtcgaagctactaagtatctaaaggccaagctaggtaagtactacatcttcgacgacactccaattgccaaggctttgtacagaaactggagagaatgtaaattcgtcgaagacgaaggtgatgttgttttctacaagcactaa

SEQ ID NO: 481 - DNA, 1212 bp, Artificial sequence
  Delta-15 Desaturase
atggcccctccacacgtcgtcgacgaacaagttagaagaagaatcgttgttgaagacgagattaagtcaaagaaacaattcgagagaaactacgtcccaatggatttcactatcaaggaaatcagagacgctatccctgctcacttattcatcagagacacaactaagtcaattctacacgttgtcaaagatttggttaccattgccattgttttctactgtgctaccttcatcgaaactttgccatccttggctttgagagttccagcatggatcacctactggattattcaaggtaccgtcatggttggtccatggattttggctcacgaatgtggtcacggtgccttttctgattccaagactatcaacactattttcggttgggtcttgcattccgctttgttggttccttatcaggcatgggcaatgtcacactctaagcaccacaagtgtactggtcctatgactaaggatgttgtcttcattccagctactcgttcctacaaaggtctacctgccctagaaaagcctgctgttgaagaagaagtttctgaacaagaacatcaccaccatgaagaatccatctttgctgaaaccccaatctacactttgggtgccttgttgttcgttttaaccttcggttggccattgtacctaattgttaacttctctggtcacgaagccccacactgggtcaaccacttccaaactgttgctccattgtacgaaccacaccaaagaaagaacatcttttactctaactgtggtattgttgctatgggctctattttgacctatttgtccatggttttctctccattaactgttttcatgtactacggtatcccatacttgggtgttaatgcttggattgtttgcattacttacttacaacacactgatccaaaggttcctcacttcagagacaacgaatggaattttcaaagaggtgccgcttgtaccatcgatagatccttcggtactattgtcaaccacttgcaccaccacatcggcgattcccaccaatgtcaccacatgttctctcaaatgccattctacaatgctgtcgaagctactaagtatctaaaggccaagctaggtaagtactacatcttcgacgacactccaattgccaaggctttgtacagaaactggagagaatgtaaattcgtcgaagacgaaggtgatgttgttttctacaagcactaa

SEQ ID NO: 482 - DNA, 1212 bp, Artificial sequence
  Delta-15 Desaturase
atggcccctccacacgtcgtcgacgaacaagttagaagaagaatcgttgttgaagacgagattaagtcaaagaaacaattcgagagaaactacgtcccaatggatttcactatcaaggaaatcagagacgctatccctgctcacttattcatcagagacacaactaagtcaattctacacgttgtcaaagatttggttaccattgccattgttttctactgtgctaccttcatcgaaactttgccatccttggctttgagagttccagcatggatcacctactggattattcaaggtaccgtcatggttggtccatggattttggctcacgaatgtggtcacggtgccttttctgattccaagactatcaacactattttcggttgggtcttgcattccgctttgttggttccttatcaggcatgggcaatgtcacactctaagcaccacaaggatactggtcatatgactaaggatgttgtcttcattccagctactcgttcctacaaaggtctacctgccctagaaaagcctgctgttgaagaagaagtttctgaacaagaacatcaccaccatgaagaatccatctttgctgaaaccccaatctacactttgggtgccttgttgttcgttttaaccttcggttggccattgtacctaattgttaacttctctggtcacgaagccccacactgggtcaaccacttccaaactgttgctccattgtacgaaccacaccaaagaaagaacatcttttactctaactgtggtattgttgctatgggctctattttgacctatttgtccatggttttctctccattaactgttttcatgtactacggtatcccatacttgggtgttaatgcttggattgtttgcattacttacttacaacacactgatccaaaggttcctcacttcagagacaacgaatggaattttcaaagaggtgccgcttgtaccatcgatagatccttcggtactattgtcaaccacttgcaccaccacatcggcgattcccaccaatgtcaccacatgttctctcaaatgccattctacaatgctgtcgaagctactaagtatctaaaggccaagctaggtaagtactacatcttcgacgacactccaattgccaaggctttgtacagaaactggagagaatgtaaattcgtcgaagacgaaggtgatgttgttttctacaagcactaa

SEQ ID NO: 483 - DNA, 1212 bp, Artificial sequence
  Delta-15 Desaturase
atggcccctccacacgtcgtcgacgaacaagttagaagaagaatcgttgttgaagacgagattaagtcaaagaaacaattcgagagaaactacgtcccaatggatttcactatcaaggaaatcagagacgctatccctgctcacttattcatcagagacacaactaagtcaattctacacgttgtcaaagatttggttaccattgccattgttttctactgtgctaccttcatcgaaactttgccatccttggctttgagagttccagcatggatcacctactggattattcaaggtaccgtcatggttggtccatggattttggctcacgaatgtggtcacggtgccttttctgaacccaagtggttcaactacattttgggttgggtcttgcattccgctttgttggttccttatcaggcatgggcaatgtcacactctaagcaccacaagggtactggttccatgactaaggatgttgtcttcattccagctactcgttcctacaaaggtctacctgccctagaaaagcctgctgttgaagaagaagtttctgaacaagaacatcaccaccatgaagaatccatctttgctgaaaccccaatctacactttgggtgccttgttgttcgttttaaccttcggttggccattgtacctaattgttaacttctctggtcacgaagccccacactgggtcaaccacttccaaactgttgctccattgtacgaaccacaccaaagaaagaacatcttttactctaactgtggtattgttgctatgggctctattttgacctatttgtccatggttttctctccattaactgttttcatgtactacggtatcccatacttgggtgttaatgcttggattgtttgcattacttacttacaacacactgatccaaaggttcctcacttcagagacaacgaatggaattttcaaagaggtgccgcttgtaccatcgatagatccttcggtactattgtcaaccacttgcaccaccacatcggcgattcccaccaatgtcaccacatgttctctcaaatgccattctacaatgctgtcgaagctactaagtatctaaaggccaagctaggtaagtactacatcttcgacgacactccaattgccaaggctttgtacagaaactggagagaatgtaaattcgtcgaagacgaaggtgatgttgttttctacaagcactaa

SEQ ID NO: 484 - DNA, 1212 bp, Artificial sequence
  Delta-15 Desaturase
atggcccctccacacgtcgtcgacgaacaagttagaagaagaatcgttgttgaagacgagattaagtcaaagaaacaattcgagagaaactacgtcccaatggatttcactatcaaggaaatcagagacgctatccctgctcacttattcatcagagacacaactaagtcaattctacacgttgtcaaagatttggttaccattgccattgttttctactgtgctaccttcatcgaaactttgccatccttggctttgagagttccagcatggatcacctactggattattcaaggtaccgtcatggttggtccatggattttggctcacgaatgtggtcacggtgccttttctgaacccaagacgttcaactacattttgggttgggtcttgcattccgctttgttggttccttatcaggcatgggcaatgtcacactctaagcaccacaagggtactggttccatgactaaggatgttgtcttcattccagctactcgttcctacaaaggtctacctgccctagaaaagcctgctgttgaagaagaagtttctgaacaagaacatcaccaccatgaagaatccatctttgctgaaaccccaatctacactttgggtgccttgttgttcgttttaaccttcggttggccattgtacctaattgttaacttctctggtcacgaagccccacactgggtcaaccacttccaaactgttgctccattgtacgaaccacaccaaagaaagaacatcttttactctaactgtggtattgttgctatgggctctattttgacctatttgtccatggttttctctccattaactgttttcatgtactacggtatcccatacttgggtgttaatgcttggattgtttgcattacttacttacaacacactgatccaaaggttcctcacttcagagacaacgaatggaattttcaaagaggtgccgcttgtaccatcgatagatccttcggtactattgtcaaccacttgcaccaccacatcggcgattcccaccaatgtcaccacatgttctctcaaatgccattctacaatgctgtcgaagctactaagtatctaaaggccaagctaggtaagtactacatcttcgacgacactccaattgccaaggctttgtacagaaactggagagaatgtaaattcgtcgaagacgaaggtgatgttgttttctacaagcactaa

SEQ ID NO: 485 - DNA, 1212 bp, Artificial sequence
  Delta-15 Desaturase
atggcccctccacacgtcgtcgacgaacaagttagaagaagaatcgttgttgaagacgagattaagtcaaagaaacaattcgagagaaactacgtcccaatggatttcactatcaaggaaatcagagacgctatccctgctcacttattcatcagagacacaactaagtcaattctacacgttgtcaaagatttggttaccattgccattgttttctactgtgctaccttcatcgaaactttgccatccttggctttgagagttccagcatggatcacctactggattattcaaggtaccgtcatggttggtccatggattttggctcacgaatgtggtcacggtgccttttctcaacccaagtcgttcaactacattatcggttgggtcttgcattccgctttgttggttccttatcaggcatgggcaatgtcacactctaagcaccacaagggtactggttccatgactaaggatgttgtcttcattccagctactcgttcctacaaaggtctacctgccctagaaaagcctgctgttgaagaagaagtttctgaacaagaacatcaccaccatgaagaatccatctttgctgaaaccccaatctacactttgggtgccttgttgttcgttttaaccttcggttggccattgtacctaattgttaacttctctggtcacgaagccccacactgggtcaaccacttccaaactgttgctccattgtacgaaccacaccaaagaaagaacatcttttactctaactgtggtattgttgctatgggctctattttgacctatttgtccatggttttctctccattaactgttttcatgtactacggtatcccatacttgggtgttaatgcttggattgtttgcattacttacttacaacacactgatccaaaggttcctcacttcagagacaacgaatggaattttcaaagaggtgccgcttgtaccatcgatagatccttcggtactattgtcaaccacttgcaccaccacatcggcgattcccaccaatgtcaccacatgttctctcaaatgccattctacaatgctgtcgaagctactaagtatctaaaggccaagctaggtaagtactacatcttcgacgacactccaattgccaaggctttgtacagaaactggagagaatgtaaattcgtcgaagacgaaggtgatgttgttttctacaagcactaa

SEQ ID NO: 486 - DNA, 1212 bp, Artificial sequence
  Delta-15 Desaturase
atggcccctccacacgtcgtcgacgaacaagttagaagaagaatcgttgttgaagacgagattaagtcaaagaaacaattcgagagaaactacgtcccaatggatttcactatcaaggaaatcagagacgctatccctgctcacttattcatcagagacacaactaagtcaattctacacgttgtcaaagatttggttaccattgccattgttttctactgtgctaccttcatcgaaactttgccatccttggctttgagagttccagcatggatcacctactggattattcaaggtaccgtcatggttggtccatggattttggctcacgaatgtggtcacggtgccttttctcatcccaagaggttcaacaacattttcggttgggtcttgcattccgctttgttggttccttatcaggcatgggcaatgtcacactctaagcaccacaagggtactggttccatgactaaggatgttgtcttcattccagctactcgttcctacaaaggtctacctgccctagaaaagcctgctgttgaagaagaagtttctgaacaagaacatcaccaccatgaagaatccatctttgctgaaaccccaatctacactttgggtgccttgttgttcgttttaaccttcggttggccattgtacctaattgttaacttctctggtcacgaagccccacactgggtcaaccacttccaaactgttgctccattgtacgaaccacaccaaagaaagaacatcttttactctaactgtggtattgttgctatgggctctattttgacctatttgtccatggttttctctccattaactgttttcatgtactacggtatcccatacttgggtgttaatgcttggattgtttgcattacttacttacaacacactgatccaaaggttcctcacttcagagacaacgaatggaattttcaaagaggtgccgcttgtaccatcgatagatccttcggtactattgtcaaccacttgcaccaccacatcggcgattcccaccaatgtcaccacatgttctctcaaatgccattctacaatgctgtcgaagctactaagtatctaaaggccaagctaggtaagtactacatcttcgacgacactccaattgccaaggctttgtacagaaactggagagaatgtaaattcgtcgaagacgaaggtgatgttgttttctacaagcactaa

SEQ ID NO: 487 - DNA, 1212 bp, Artificial sequence
  Delta-15 Desaturase
atggcccctccacacgtcgtcgacgaacaagttagaagaagaatcgttgttgaagacgagattaagtcaaagaaacaattcgagagaaactacgtcccaatggatttcactatcaaggaaatcagagacgctatccctgctcacttattcatcagagacacaactaagtcaattctacacgttgtcaaagatttggttaccattgccattgttttctactgtgctaccttcatcgaaactttgccatccttggctttgagagttccagcatggatcacctactggattattcaaggtaccgtcatggttggtccatggattttggctcacgaatgtggtcacggtgccttttctgaacccaagtcgttcaactccattttgggttgggtcttgcattccgctttgttggttccttatcaggcatgggcaatgtcacactctaagcaccacaagggtactggttccatgactaaggatgttgtcttcattccagctactcgttcctacaaaggtctacctgccctagaaaagcctgctgttgaagaagaagtttctgaacaagaacatcaccaccatgaagaatccatctttgctgaaaccccaatctacactttgggtgccttgttgttcgttttaaccttcggttggccattgtacctaattgttaacttctctggtcacgaagccccacactgggtcaaccacttccaaactgttgctccattgtacgaaccacaccaaagaaagaacatcttttactctaactgtggtattgttgctatgggctctattttgacctatttgtccatggttttctctccattaactgttttcatgtactacggtatcccatacttgggtgttaatgcttggattgtttgcattacttacttacaacacactgatccaaaggttcctcacttcagagacaacgaatggaattttcaaagaggtgccgcttgtaccatcgatagatccttcggtactattgtcaaccacttgcaccaccacatcggcgattcccaccaatgtcaccacatgttctctcaaatgccattctacaatgctgtcgaagctactaagtatctaaaggccaagctaggtaagtactacatcttcgacgacactccaattgccaaggctttgtacagaaactggagagaatgtaaattcgtcgaagacgaaggtgatgttgttttctacaagcactaa

SEQ ID NO: 488 - DNA, 1212 bp, Artificial sequence
  Delta-15 Desaturase
atggcccctccacacgtcgtcgacgaacaagttagaagaagaatcgttgttgaagacgagattaagtcaaagaaacaattcgagagaaactacgtcccaatggatttcactatcaaggaaatcagagacgctatccctgctcacttattcatcagagacacaactaagtcaattctacacgttgtcaaagatttggttaccattgccattgttttctactgtgctaccttcatcgaaactttgccatccttggctttgagagttccagcatggatcacctactggattattcaaggtaccgtcatggttggtccatggattttggctcacgaatgtggtcacggtgccttttctgaacccaagacgttcaactacattatcggttgggtcttgcattccgctttgttggttccttatcaggcatgggcaatgtcacactctaagcaccacaagggtactggttccatgactaaggatgttgtcttcattccagctactcgttcctacaaaggtctacctgccctagaaaagcctgctgttgaagaagaagtttctgaacaagaacatcaccaccatgaagaatccatctttgctgaaaccccaatctacactttgggtgccttgttgttcgttttaaccttcggttggccattgtacctaattgttaacttctctggtcacgaagccccacactgggtcaaccacttccaaactgttgctccattgtacgaaccacaccaaagaaagaacatcttttactctaactgtggtattgttgctatgggctctattttgacctatttgtccatggttttctctccattaactgttttcatgtactacggtatcccatacttgggtgttaatgcttggattgtttgcattacttacttacaacacactgatccaaaggttcctcacttcagagacaacgaatggaattttcaaagaggtgccgcttgtaccatcgatagatccttcggtactattgtcaaccacttgcaccaccacatcggcgattcccaccaatgtcaccacatgttctctcaaatgccattctacaatgctgtcgaagctactaagtatctaaaggccaagctaggtaagtactacatcttcgacgacactccaattgccaaggctttgtacagaaactggagagaatgtaaattcgtcgaagacgaaggtgatgttgttttctacaagcactaa

SEQ ID NO: 489 - DNA, 1212 bp, Artificial sequence
  Delta-15 Desaturase
atggcccctccacacgtcgtcgacgaacaagttagaagaagaatcgttgttgaagacgagattaagtcaaagaaacaattcgagagaaactacgtcccaatggatttcactatcaaggaaatcagagacgctatccctgctcacttattcatcagagacacaactaagtcaattctacacgttgtcaaagatttggttaccattgccattgttttctactgtgctaccttcatcgaaactttgccatccttggctttgagagttccagcatggatcacctactggattattcaaggtaccgtcatggttggtccatggattttggctcacgaatgtggtcacggtgccttttctgatcccaagtcgttcaactacattatgggttgggtcttgcattccgctttgttggttccttatcaggcatgggcaatgtcacactctaagcaccacaagggtactggttccatgactaaggatgttgtcttcattccagctactcgttcctacaaaggtctacctgccctagaaaagcctgctgttgaagaagaagtttctgaacaagaacatcaccaccatgaagaatccatctttgctgaaaccccaatctacactttgggtgccttgttgttcgttttaaccttcggttggccattgtacctaattgttaacttctctggtcacgaagccccacactgggtcaaccacttccaaactgttgctccattgtacgaaccacaccaaagaaagaacatcttttactctaactgtggtattgttgctatgggctctattttgacctatttgtccatggttttctctccattaactgttttcatgtactacggtatcccatacttgggtgttaatgcttggattgtttgcattacttacttacaacacactgatccaaaggttcctcacttcagagacaacgaatggaattttcaaagaggtgccgcttgtaccatcgatagatccttcggtactattgtcaaccacttgcaccaccacatcggcgattcccaccaatgtcaccacatgttctctcaaatgccattctacaatgctgtcgaagctactaagtatctaaaggccaagctaggtaagtactacatcttcgacgacactccaattgccaaggctttgtacagaaactggagagaatgtaaattcgtcgaagacgaaggtgatgttgttttctacaagcactaa

SEQ ID NO: 490 - DNA, 1212 bp, Artificial sequence
  Delta-15 Desaturase
atggcccctccacacgtcgtcgacgaacaagttagaagaagaatcgttgttgaagacgagattaagtcaaagaaacaattcgagagaaactacgtcccaatggatttcactatcaaggaaatcagagacgctatccctgctcacttattcatcagagacacaactaagtcaattctacacgttgtcaaagatttggttaccattgccattgttttctactgtgctaccttcatcgaaactttgccatccttggctttgagagttccagcatggatcacctactggattattcaaggtaccgtcatggttggtccatggattttggctcacgaatgtggtcacggtgccttttctgaacccaagaggttcaactccattttgggttgggtcttgcattccgctttgttggttccttatcaggcatgggcaatgtcacactctaagcaccacaagggtactggttccatgactaaggatgttgtcttcattccagctactcgttcctacaaaggtctacctgccctagaaaagcctgctgttgaagaagaagtttctgaacaagaacatcaccaccatgaagaatccatctttgctgaaaccccaatctacactttgggtgccttgttgttcgttttaaccttcggttggccattgtacctaattgttaacttctctggtcacgaagccccacactgggtcaaccacttccaaactgttgctccattgtacgaaccacaccaaagaaagaacatcttttactctaactgtggtattgttgctatgggctctattttgacctatttgtccatggttttctctccattaactgttttcatgtactacggtatcccatacttgggtgttaatgcttggattgtttgcattacttacttacaacacactgatccaaaggttcctcacttcagagacaacgaatggaattttcaaagaggtgccgcttgtaccatcgatagatccttcggtactattgtcaaccacttgcaccaccacatcggcgattcccaccaatgtcaccacatgttctctcaaatgccattctacaatgctgtcgaagctactaagtatctaaaggccaagctaggtaagtactacatcttcgacgacactccaattgccaaggctttgtacagaaactggagagaatgtaaattcgtcgaagacgaaggtgatgttgttttctacaagcactaa

SEQ ID NO: 491 - DNA, 1212 bp, Artificial sequence
  Delta-15 Desaturase
atggcccctccacacgtcgtcgacgaacaagttagaagaagaatcgttgttgaagacgagattaagtcaaagaaacaattcgagagaaactacgtcccaatggatttcactatcaaggaaatcagagacgctatccctgctcacttattcatcagagacacaactaagtcaattctacacgttgtcaaagatttggttaccattgccattgttttctactgtgctaccttcatcgaaactttgccatccttggctttgagagttccagcatggatcacctactggattattcaaggtaccgtcatggttggtccatggattttggctcacgaatgtggtcacggtgccttttctcatcccaagtcgttcaactacattatcggttgggtcttgcattccgctttgttggttccttatcaggcatgggcaatgtcacactctaagcaccacaagggtactggttccatgactaaggatgttgtcttcattccagctactcgttcctacaaaggtctacctgccctagaaaagcctgctgttgaagaagaagtttctgaacaagaacatcaccaccatgaagaatccatctttgctgaaaccccaatctacactttgggtgccttgttgttcgttttaaccttcggttggccattgtacctaattgttaacttctctggtcacgaagccccacactgggtcaaccacttccaaactgttgctccattgtacgaaccacaccaaagaaagaacatcttttactctaactgtggtattgttgctatgggctctattttgacctatttgtccatggttttctctccattaactgttttcatgtactacggtatcccatacttgggtgttaatgcttggattgtttgcattacttacttacaacacactgatccaaaggttcctcacttcagagacaacgaatggaattttcaaagaggtgccgcttgtaccatcgatagatccttcggtactattgtcaaccacttgcaccaccacatcggcgattcccaccaatgtcaccacatgttctctcaaatgccattctacaatgctgtcgaagctactaagtatctaaaggccaagctaggtaagtactacatcttcgacgacactccaattgccaaggctttgtacagaaactggagagaatgtaaattcgtcgaagacgaaggtgatgttgttttctacaagcactaa

SEQ ID NO: 492 - DNA, 1212 bp, Artificial sequence
  Delta-15 Desaturase
atggcccctccacacgtcgtcgacgaacaagttagaagaagaatcgttgttgaagacgagattaagtcaaagaaacaattcgagagaaactacgtcccaatggatttcactatcaaggaaatcagagacgctatccctgctcacttattcatcagagacacaactaagtcaattctacacgttgtcaaagatttggttaccattgccattgttttctactgtgctaccttcatcgaaactttgccatccttggctttgagagttccagcatggatcacctactggattattcaaggtaccgtcatggttggtccatggattttggctcacgaatgtggtcacggtgccttttctcatcccaagtcgttcaacaacattatcggttgggtcttgcattccgctttgttggttccttatcaggcatgggcaatgtcacactctaagcaccacaagggtactggttccatgactaaggatgttgtcttcattccagctactcgttcctacaaaggtctacctgccctagaaaagcctgctgttgaagaagaagtttctgaacaagaacatcaccaccatgaagaatccatctttgctgaaaccccaatctacactttgggtgccttgttgttcgttttaaccttcggttggccattgtacctaattgttaacttctctggtcacgaagccccacactgggtcaaccacttccaaactgttgctccattgtacgaaccacaccaaagaaagaacatcttttactctaactgtggtattgttgctatgggctctattttgacctatttgtccatggttttctctccattaactgttttcatgtactacggtatcccatacttgggtgttaatgcttggattgtttgcattacttacttacaacacactgatccaaaggttcctcacttcagagacaacgaatggaattttcaaagaggtgccgcttgtaccatcgatagatccttcggtactattgtcaaccacttgcaccaccacatcggcgattcccaccaatgtcaccacatgttctctcaaatgccattctacaatgctgtcgaagctactaagtatctaaaggccaagctaggtaagtactacatcttcgacgacactccaattgccaaggctttgtacagaaactggagagaatgtaaattcgtcgaagacgaaggtgatgttgttttctacaagcactaa

SEQ ID NO: 493 - DNA, 1212 bp, Artificial sequence
  Delta-15 Desaturase
atggcccctccacacgtcgtcgacgaacaagttagaagaagaatcgttgttgaagacgagattaagtcaaagaaacaattcgagagaaactacgtcccaatggatttcactatcaaggaaatcagagacgctatccctgctcacttattcatcagagacacaactaagtcaattctacacgttgtcaaagatttggttaccattgccattgttttctactgtgctaccttcatcgaaactttgccatccttggctttgagagttccagcatggatcacctactggattattcaaggtaccgtcatggttggtccatggattttggctcacgaatgtggtcacggtgccttttctgaacccaagacgttcaactccattttgggttgggtcttgcattccgctttgttggttccttatcaggcatgggcaatgtcacactctaagcaccacaagggtactggttccatgactaaggatgttgtcttcattccagctactcgttcctacaaaggtctacctgccctagaaaagcctgctgttgaagaagaagtttctgaacaagaacatcaccaccatgaagaatccatctttgctgaaaccccaatctacactttgggtgccttgttgttcgttttaaccttcggttggccattgtacctaattgttaacttctctggtcacgaagccccacactgggtcaaccacttccaaactgttgctccattgtacgaaccacaccaaagaaagaacatcttttactctaactgtggtattgttgctatgggctctattttgacctatttgtccatggttttctctccattaactgttttcatgtactacggtatcccatacttgggtgttaatgcttggattgtttgcattacttacttacaacacactgatccaaaggttcctcacttcagagacaacgaatggaattttcaaagaggtgccgcttgtaccatcgatagatccttcggtactattgtcaaccacttgcaccaccacatcggcgattcccaccaatgtcaccacatgttctctcaaatgccattctacaatgctgtcgaagctactaagtatctaaaggccaagctaggtaagtactacatcttcgacgacactccaattgccaaggctttgtacagaaactggagagaatgtaaattcgtcgaagacgaaggtgatgttgttttctacaagcactaa

SEQ ID NO: 494 - DNA, 1212 bp, Artificial sequence
  Delta-15 Desaturase
atggcccctccacacgtcgtcgacgaacaagttagaagaagaatcgttgttgaagacgagattaagtcaaagaaacaattcgagagaaactacgtcccaatggatttcactatcaaggaaatcagagacgctatccctgctcacttattcatcagagacacaactaagtcaattctacacgttgtcaaagatttggttaccattgccattgttttctactgtgctaccttcatcgaaactttgccatccttggctttgagagttccagcatggatcacctactggattattcaaggtaccgtcatggttggtccatggattttggctcacgaatgtggtcacggtgccttttctaactccacgaggttcaactacattatgggttgggtcttgcattccgctttgttggttccttatcaggcatgggcaatgtcacactctaagcaccacaagggtactggttccatgactaaggatgttgtcttcattccagctactcgttcctacaaaggtctacctgccctagaaaagcctgctgttgaagaagaagtttctgaacaagaacatcaccaccatgaagaatccatctttgctgaaaccccaatctacactttgggtgccttgttgttcgttttaaccttcggttggccattgtacctaattgttaacttctctggtcacgaagccccacactgggtcaaccacttccaaactgttgctccattgtacgaaccacaccaaagaaagaacatcttttactctaactgtggtattgttgctatgggctctattttgacctatttgtccatggttttctctccattaactgttttcatgtactacggtatcccatacttgggtgttaatgcttggattgtttgcattacttacttacaacacactgatccaaaggttcctcacttcagagacaacgaatggaattttcaaagaggtgccgcttgtaccatcgatagatccttcggtactattgtcaaccacttgcaccaccacatcggcgattcccaccaatgtcaccacatgttctctcaaatgccattctacaatgctgtcgaagctactaagtatctaaaggccaagctaggtaagtactacatcttcgacgacactccaattgccaaggctttgtacagaaactggagagaatgtaaattcgtcgaagacgaaggtgatgttgttttctacaagcactaa

SEQ ID NO: 495 - DNA, 1212 bp, Artificial sequence
  Delta-15 Desaturase
atggcccctccacacgtcgtcgacgaacaagttagaagaagaatcgttgttgaagacgagattaagtcaaagaaacaattcgagagaaactacgtcccaatggatttcactatcaaggaaatcagagacgctatccctgctcacttattcatcagagacacaactaagtcaattctacacgttgtcaaagatttggttaccattgccattgttttctactgtgctaccttcatcgaaactttgccatccttggctttgagagttccagcatggatcacctactggattattcaaggtaccgtcatggttggtccatggattttggctcacgaatgtggtcacggtgccttttctaagcccaagaggttcaactacattatgggttgggtcttgcattccgctttgttggttccttatcaggcatgggcaatgtcacactctaagcaccacaagggtactggttccatgactaaggatgttgtcttcattccagctactcgttcctacaaaggtctacctgccctagaaaagcctgctgttgaagaagaagtttctgaacaagaacatcaccaccatgaagaatccatctttgctgaaaccccaatctacactttgggtgccttgttgttcgttttaaccttcggttggccattgtacctaattgttaacttctctggtcacgaagccccacactgggtcaaccacttccaaactgttgctccattgtacgaaccacaccaaagaaagaacatcttttactctaactgtggtattgttgctatgggctctattttgacctatttgtccatggttttctctccattaactgttttcatgtactacggtatcccatacttgggtgttaatgcttggattgtttgcattacttacttacaacacactgatccaaaggttcctcacttcagagacaacgaatggaattttcaaagaggtgccgcttgtaccatcgatagatccttcggtactattgtcaaccacttgcaccaccacatcggcgattcccaccaatgtcaccacatgttctctcaaatgccattctacaatgctgtcgaagctactaagtatctaaaggccaagctaggtaagtactacatcttcgacgacactccaattgccaaggctttgtacagaaactggagagaatgtaaattcgtcgaagacgaaggtgatgttgttttctacaagcactaa

SEQ ID NO: 496 - DNA, 1212 bp, Artificial sequence
  Delta-15 Desaturase
atggcccctccacacgtcgtcgacgaacaagttagaagaagaatcgttgttgaagacgagattaagtcaaagaaacaattcgagagaaactacgtcccaatggatttcactatcaaggaaatcagagacgctatccctgctcacttattcatcagagacacaactaagtcaattctacacgttgtcaaagatttggttaccattgccattgttttctactgtgctaccttcatcgaaactttgccatccttggctttgagagttccagcatggatcacctactggattattcaaggtaccgtcatggttggtccatggattttggctcacgaatgtggtcacggtgccttttctgaatccaagtggttcaacaacattttcggttgggtcttgcattccgctttgttggttccttatcaggcatgggcaatgtcacactctaagcaccacaaggatactggttccatgactaaggatgttgtcttcattccagctactcgttcctacaaaggtctacctgccctagaaaagcctgctgttgaagaagaagtttctgaacaagaacatcaccaccatgaagaatccatctttgctgaaaccccaatctacactttgggtgccttgttgttcgttttaaccttcggttggccattgtacctaattgttaacttctctggtcacgaagccccacactgggtcaaccacttccaaactgttgctccattgtacgaaccacaccaaagaaagaacatcttttactctaactgtggtattgttgctatgggctctattttgacctatttgtccatggttttctctccattaactgttttcatgtactacggtatcccatacttgggtgttaatgcttggattgtttgcattacttacttacaacacactgatccaaaggttcctcacttcagagacaacgaatggaattttcaaagaggtgccgcttgtaccatcgatagatccttcggtactattgtcaaccacttgcaccaccacatcggcgattcccaccaatgtcaccacatgttctctcaaatgccattctacaatgctgtcgaagctactaagtatctaaaggccaagctaggtaagtactacatcttcgacgacactccaattgccaaggctttgtacagaaactggagagaatgtaaattcgtcgaagacgaaggtgatgttgttttctacaagcactaa

SEQ ID NO: 497 - DNA, 1212 bp, Artificial sequence
  Delta-15 Desaturase
atggcccctccacacgtcgtcgacgaacaagttagaagaagaatcgttgttgaagacgagattaagtcaaagaaacaattcgagagaaactacgtcccaatggatttcactatcaaggaaatcagagacgctatccctgctcacttattcatcagagacacaactaagtcaattctacacgttgtcaaagatttggttaccattgccattgttttctactgtgctaccttcatcgaaactttgccatccttggctttgagagttccagcatggatcacctactggattattcaaggtaccgtcatggttggtccatggattttggctcacgaatgtggtcacggtgccttttctgatcccacgaggttcaactacattatgggttgggtcttgcattccgctttgttggttccttatcaggcatgggcaatgtcacactctaagcaccacaagggtactggttccatgactaaggatgtggtcttcattccagctactcgttcctacaaaggtctacctgccctagaaaagcctgctgttgaagaagaagtttctgaacaagaacatcaccaccatgaagaatccatctttgctgaaaccccaatctacactttgggtgccttgttgttcgttttaaccttcggttggccattgtacctaattgttaacttctctggtcacgaagccccacactgggtcaaccacttccaaactgttgctccattgtacgaaccacaccaaagaaagaacatcttttactctaactgtggtattgttgctatgggctctattttgacctatttgtccatggttttctctccattaactgttttcatgtactacggtatcccatacttgggtgttaatgcttggattgtttgcattacttacttacaacacactgatccaaaggttcctcacttcagagacaacgaatggaattttcaaagaggtgccgcttgtaccatcgatagatccttcggtactattgtcaaccacttgcaccaccacatcggcgattcccaccaatgtcaccacatgttctctcaaatgccattctacaatgctgtcgaagctactaagtatctaaaggccaagctaggtaagtactacatcttcgacgacactccaattgccaaggctttgtacagaaactggagagaatgtaaattcgtcgaagacgaaggtgatgttgttttctacaagcactaa

SEQ ID NO: 498 - DNA, 1212 bp, Artificial sequence
  Delta-15 Desaturase
atggcccctccacacgtcgtcgacgaacaagttagaagaagaatcgttgttgaagacgagattaagtcaaagaaacaattcgagagaaactacgtcccaatggatttcactatcaaggaaatcagagacgctatccctgctcacttattcatcagagacacaactaagtcaattctacacgttgtcaaagatttggttaccattgccattgttttctactgtgctaccttcatcgaaactttgccatccttggctttgagagttccagcatggatcacctactggattattcaaggtaccgtcatggttggtccatggattttggctcacgaatgtggtcacggtgccttttctaaccccacgaggttcaactacattatgggttgggtcttgcattccgctttgttggttccttatcaggcatgggcaatgtcacactctaagcaccacaagggtactggttccatgactaaggatgttgtcttcattccagctactcgttcctacaaaggtctacctgccctagaaaagcctgctgttgaagaagaagtttctgaacaagaacatcaccaccatgaagaatccatctttgctgaaaccccaatctacactttgggtgccttgttgttcgttttaaccttcggttggccattgtacctaattgttaacttctctggtcacgaagccccacactgggtcaaccacttccaaactgttgctccattgtacgaaccacaccaaagaaagaacatcttttactctaactgtggtattgttgctatgggctctattttgacctatttgtccatggttttctctccattaactgttttcatgtactacggtatcccatacttgggtgttaatgcttggattgtttgcattacttacttacaacacactgatccaaaggttcctcacttcagagacaacgaatggaattttcaaagaggtgccgcttgtaccatcgatagatccttcggtactattgtcaaccacttgcaccaccacatcggcgattcccaccaatgtcaccacatgttctctcaaatgccattctacaatgctgtcgaagctactaagtatctaaaggccaagctaggtaagtactacatcttcgacgacactccaattgccaaggctttgtacagaaactggagagaatgtaaattcgtcgaagacgaaggtgatgttgttttctacaagcactaa

SEQ ID NO: 499 - DNA, 1212 bp, Artificial sequence
  Delta-15 Desaturase
atggcccctccacacgtcgtcgacgaacaagttagaagaagaatcgttgttgaagacgagattaagtcaaagaaacaattcgagagaaactacgtcccaatggatttcactatcaaggaaatcagagacgctatccctgctcacttattcatcagagacacaactaagtcaattctacacgttgtcaaagatttggttaccattgccattgttttctactgtgctaccttcatcgaaactttgccatccttggctttgagagttccagcatggatcacctactggattattcaaggtaccgtcatggttggtccatggattttggctcacgaatgtggtcacggtgccttttctaaacccaggtcgttcaactacattttcggttgggtcttgcattccgctttgttggttccttatcaggcatgggcaatgtcacactctaagcaccacaagggtactggttccatgactaaggatgttgtcttcattccagctactcgttcctacaaaggtctacctgccctagaaaagcctgctgttgaagaagaagtttctgaacaagaacatcaccaccatgaagaatccatctttgctgaaaccccaatctacactttgggtgccttgttgttcgttttaaccttcggttggccattgtacctaattgttaacttctctggtcacgaagccccacactgggtcaaccacttccaaactgttgctccattgtacgaaccacaccaaagaaagaacatcttttactctaactgtggtattgttgctatgggctctattttgacctatttgtccatggttttctctccattaactgttttcatgtactacggtatcccatacttgggtgttaatgcttggattgtttgcattacttacttacaacacactgatccaaaggttcctcacttcagagacaacgaatggaattttcaaagaggtgccgcttgtaccatcgatagatccttcggtactattgtcaaccacttgcaccaccacatcggcgattcccaccaatgtcaccacatgttctctcaaatgccattctacaatgctgtcgaagctactaagtatctaaaggccaagctaggtaagtactacatcttcgacgacactccaattgccaaggctttgtacagaaactggagagaatgtaaattcgtcgaagacgaaggtgatgttgttttctacaagcactaa

SEQ ID NO: 500 - DNA, 1212 bp, Artificial sequence
  Delta-15 Desaturase
atggcccctccacacgtcgtcgacgaacaagttagaagaagaatcgttgttgaagacgagattaagtcaaagaaacaattcgagagaaactacgtcccaatggatttcactatcaaggaaatcagagacgctatccctgctcacttattcatcagagacacaactaagtcaattctacacgttgtcaaagatttggttaccattgccattgttttctactgtgctaccttcatcgaaactttgccatccttggctttgagagttccagcatggatcacctactggattattcaaggtaccgtcatggttggtccatggattttggctcacgaatgtggtcacggtgccttttctcactccacgacgttcaactccattatcggttgggtcttgcattccgctttgttggttccttatcaggcatgggcaatgtcacactctaagcaccacaagggtactggtgctatgacgaaggatatcgtcttcattccagctactcgttcctacaaaggtctacctgccctagaaaagcctgctgttgaagaagaagtttctgaacaagaacatcaccaccatgaagaatccatctttgctgaaaccccaatctacactttgggtgccttgttgttcgttttaaccttcggttggccattgtacctaattgttaacttctctggtcacgaagccccacactgggtcaaccacttccaaactgttgctccattgtacgaaccacaccaaagaaagaacatcttttactctaactgtggtattgttgctatgggctctattttgacctatttgtccatggttttctctccattaactgttttcatgtactacggtatcccatacttgggtgttaatgcttggattgtttgcattacttacttacaacacactgatccaaaggttcctcacttcagagacaacgaatggaattttcaaagaggtgccgcttgtaccatcgatagatccttcggtactattgtcaaccacttgcaccaccacatcggcgattcccaccaatgtcaccacatgttctctcaaatgccattctacaatgctgtcgaagctactaagtatctaaaggccaagctaggtaagtactacatcttcgacgacactccaattgccaaggctttgtacagaaactggagagaatgtaaattcgtcgaagacgaaggtgatgttgttttctacaagcactaa

SEQ ID NO: 501 - DNA, 1212 bp, Artificial sequence
  Delta-15 Desaturase
atggcccctccacacgtcgtcgacgaacaagttagaagaagaatcgttgttgaagacgagattaagtcaaagaaacaattcgagagaaactacgtcccaatggatttcactatcaaggaaatcagagacgctatccctgctcacttattcatcagagacacaactaagtcaattctacacgttgtcaaagatttggttaccattgccattgttttctactgtgctaccttcatcgaaactttgccatccttggctttgagagttccagcatggatcacctactggattattcaaggtaccgtcatggttggtccatggattttggctcacgaatgtggtcacggtgccttttctaagcacaggacgttcaactacattatcggttgggtcttgcattccgctttgttggttccttatcaggcatgggcaatgtcacactctaagcaccacaagtgtactggttccatgactaaggatatcgtcttcattccagctactcgttcctacaaaggtctacctgccctagaaaagcctgctgttgaagaagaagtttctgaacaagaacatcaccaccatgaagaatccatctttgctgaaaccccaatctacactttgggtgccttgttgttcgttttaaccttcggttggccattgtacctaattgttaacttctctggtcacgaagccccacactgggtcaaccacttccaaactgttgctccattgtacgaaccacaccaaagaaagaacatcttttactctaactgtggtattgttgctatgggctctattttgacctatttgtccatggttttctctccattaactgttttcatgtactacggtatcccatacttgggtgttaatgcttggattgtttgcattacttacttacaacacactgatccaaaggttcctcacttcagagacaacgaatggaattttcaaagaggtgccgcttgtaccatcgatagatccttcggtactattgtcaaccacttgcaccaccacatcggcgattcccaccaatgtcaccacatgttctctcaaatgccattctacaatgctgtcgaagctactaagtatctaaaggccaagctaggtaagtactacatcttcgacgacactccaattgccaaggctttgtacagaaactggagagaatgtaaattcgtcgaagacgaaggtgatgttgttttctacaagcactaa

SEQ ID NO: 502 - DNA, 1212 bp, Artificial sequence
  Delta-15 Desaturase
atggcccctccacacgtcgtcgacgaacaagttagaagaagaatcgttgttgaagacgagattaagtcaaagaaacaattcgagagaaactacgtcccaatggatttcactatcaaggaaatcagagacgctatccctgctcacttattcatcagagacacaactaagtcaattctacacgttgtcaaagatttggttaccattgccattgttttctactgtgctaccttcatcgaaactttgccatccttggctttgagagttccagcatggatcacctactggattattcaaggtaccgtcatggttggtccatggattttggctcacgaatgtggtcacggtgccttttctaaatacaagtggatcaacaccattttgggttgggtcttgcattccgctttgttggttccttatcaggcatgggcaatgtcacactctaagcaccacaagtgtactggtgctatggcgaaggatgttgtcttcattccagctactcgttcctacaaaggtctacctgccctagaaaagcctgctgttgaagaagaagtttctgaacaagaacatcaccaccatgaagaatccatctttgctgaaaccccaatctacactttgggtgccttgttgttcgttttaaccttcggttggccattgtacctaattgttaacttctctggtcacgaagccccacactgggtcaaccacttccaaactgttgctccattgtacgaaccacaccaaagaaagaacatcttttactctaactgtggtattgttgctatgggctctattttgacctatttgtccatggttttctctccattaactgttttcatgtactacggtatcccatacttgggtgttaatgcttggattgtttgcattacttacttacaacacactgatccaaaggttcctcacttcagagacaacgaatggaattttcaaagaggtgccgcttgtaccatcgatagatccttcggtactattgtcaaccacttgcaccaccacatcggcgattcccaccaatgtcaccacatgttctctcaaatgccattctacaatgctgtcgaagctactaagtatctaaaggccaagctaggtaagtactacatcttcgacgacactccaattgccaaggctttgtacagaaactggagagaatgtaaattcgtcgaagacgaaggtgatgttgttttctacaagcactaa

SEQ ID NO: 503 - DNA, 1212 bp, Artificial sequence
  Delta-15 Desaturase
atggcccctccacacgtcgtcgacgaacaagttagaagaagaatcgttgttgaagacgagattaagtcaaagaaacaattcgagagaaactacgtcccaatggatttcactatcaaggaaatcagagacgctatccctgctcacttattcatcagagacacaactaagtcaattctacacgttgtcaaagatttggttaccattgccattgttttctactgtgctaccttcatcgaaactttgccatccttggctttgagagttccagcatggatcacctactggattattcaaggtaccgtcatggttggtccatggattttggctcacgaatgtggtcacggtgccttttctcaccccaggacgatcaactacattatcggttgggtcttgcattccgctttgttggttccttatcaggcatgggcaatgtcacactctaagcaccacaagggtactggttccatgactaaggatgttgtcttcattccagctactcgttcctacaaaggtctacctgccctagaaaagcctgctgttgaagaagaagtttctgaacaagaacatcaccaccatgaagaatccatctttgctgaaaccccaatctacactttgggtgccttgttgttcgttttaaccttcggttggccattgtacctaattgttaacttctctggtcacgaagccccacactgggtcaaccacttccaaactgttgctccattgtacgaaccacaccaaagaaagaacatcttttactctaactgtggtattgttgctatgggctctattttgacctatttgtccatggttttctctccattaactgttttcatgtactacggtatcccatacttgggtgttaatgcttggattgtttgcattacttacttacaacacactgatccaaaggttcctcacttcagagacaacgaatggaattttcaaagaggtgccgcttgtaccatcgatagatccttcggtactattgtcaaccacttgcaccaccacatcggcgattcccaccaatgtcaccacatgttctctcaaatgccattctacaatgctgtcgaagctactaagtatctaaaggccaagctaggtaagtactacatcttcgacgacactccaattgccaaggctttgtacagaaactggagagaatgtaaattcgtcgaagacgaaggtgatgttgttttctacaagcactaa

SEQ ID NO: 504 - DNA, 1212 bp, Artificial sequence
  Delta-15 Desaturase
atggcccctccacacgtcgtcgacgaacaagttagaagaagaatcgttgttgaagacgagattaagtcaaagaaacaattcgagagaaactacgtcccaatggatttcactatcaaggaaatcagagacgctatccctgctcacttattcatcagagacacaactaagtcaattctacacgttgtcaaagatttggttaccattgccattgttttctactgtgctaccttcatcgaaactttgccatccttggctttgagagttccagcatggatcacctactggattattcaaggtaccgtcatggttggtccatggattttggctcacgaatgtggtcacggtgccttttctaagtacaggtcgatcaactacattatcggttgggtcttgcattccgctttgttggttccttatcaggcatgggcaatgtcacactctaagcaccacaagggtactggttccatgactaaggatgttgtcttcattccagctactcgttcctacaaaggtctacctgccctagaaaagcctgctgttgaagaagaagtttctgaacaagaacatcaccaccatgaagaatccatctttgctgaaaccccaatctacactttgggtgccttgttgttcgttttaaccttcggttggccattgtacctaattgttaacttctctggtcacgaagccccacactgggtcaaccacttccaaactgttgctccattgtacgaaccacaccaaagaaagaacatcttttactctaactgtggtattgttgctatgggctctattttgacctatttgtccatggttttctctccattaactgttttcatgtactacggtatcccatacttgggtgttaatgcttggattgtttgcattacttacttacaacacactgatccaaaggttcctcacttcagagacaacgaatggaattttcaaagaggtgccgcttgtaccatcgatagatccttcggtactattgtcaaccacttgcaccaccacatcggcgattcccaccaatgtcaccacatgttctctcaaatgccattctacaatgctgtcgaagctactaagtatctaaaggccaagctaggtaagtactacatcttcgacgacactccaattgccaaggctttgtacagaaactggagagaatgtaaattcgtcgaagacgaaggtgatgttgttttctacaagcactaa

SEQ ID NO: 505 - DNA, 1212 bp, Artificial sequence
  Delta-15 Desaturase
atggcccctccacacgtcgtcgacgaacaagttagaagaagaatcgttgttgaagacgagattaagtcaaagaaacaattcgagagaaactacgtcccaatggatttcactatcaaggaaatcagagacgctatccctgctcacttattcatcagagacacaactaagtcaattctacacgttgtcaaagatttggttaccattgccattgttttctactgtgctaccttcatcgaaactttgccatccttggctttgagagttccagcatggatcacctactggattattcaaggtaccgtcatggttggtccatggattttggctcacgaatgtggtcacggtgccttttctcaacacacgaggatcaactccattttgggttgggtcttgcattccgctttgttggttccttatcaggcatgggcaatgtcacactctaagcaccacaagggtactggttccatgactaaggatgttgtcttcattccagctactcgttcctacaaaggtctacctgccctagaaaagcctgctgttgaagaagaagtttctgaacaagaacatcaccaccatgaagaatccatctttgctgaaaccccaatctacactttgggtgccttgttgttcgttttaaccttcggttggccattgtacctaattgttaacttctctggtcacgaagccccacactgggtcaaccacttccaaactgttgctccattgtacgaaccacaccaaagaaagaacatcttttactctaactgtggtattgttgctatgggctctattttgacctatttgtccatggttttctctccattaactgttttcatgtactacggtatcccatacttgggtgttaatgcttggattgtttgcattacttacttacaacacactgatccaaaggttcctcacttcagagacaacgaatggaattttcaaagaggtgccgcttgtaccatcgatagatccttcggtactattgtcaaccacttgcaccaccacatcggcgattcccaccaatgtcaccacatgttctctcaaatgccattctacaatgctgtcgaagctactaagtatctaaaggccaagctaggtaagtactacatcttcgacgacactccaattgccaaggctttgtacagaaactggagagaatgtaaattcgtcgaagacgaaggtgatgttgttttctacaagcactaa

SEQ ID NO: 506 - DNA, 1212 bp, Artificial sequence
  Delta-15 Desaturase
atggcccctccacacgtcgtcgacgaacaagttagaagaagaatcgttgttgaagacgagattaagtcaaagaaacaattcgagagaaactacgtcccaatggatttcactatcaaggaaatcagagacgctatccctgctcacttattcatcagagacacaactaagtcaattctacacgttgtcaaagatttggttaccattgccattgttttctactgtgctaccttcatcgaaactttgccatccttggctttgagagttccagcatggatcacctactggattattcaaggtaccgtcatggttggtccatggattttggctcacgaatgtggtcacggtgccttttctaatcccacgtcgttcaacaacattatgggttgggtcttgcattccgctttgttggttccttatcaggcatgggcaatgtcacactctaagcaccacaagggtactggttccatgactaaggatgttgtcttcattccagctactcgttcctacaaaggtctacctgccctagaaaagcctgctgttgaagaagaagtttctgaacaagaacatcaccaccatgaagaatccatctttgctgaaaccccaatctacactttgggtgccttgttgttcgttttaaccttcggttggccattgtacctaattgttaacttctctggtcacgaagccccacactgggtcaaccacttccaaactgttgctccattgtacgaaccacaccaaagaaagaacatcttttactctaactgtggtattgttgctatgggctctattttgacctatttgtccatggttttctctccattaactgttttcatgtactacggtatcccatacttgggtgttaatgcttggattgtttgcattacttacttacaacacactgatccaaaggttcctcacttcagagacaacgaatggaattttcaaagaggtgccgcttgtaccatcgatagatccttcggtactattgtcaaccacttgcaccaccacatcggcgattcccaccaatgtcaccacatgttctctcaaatgccattctacaatgctgtcgaagctactaagtatctaaaggccaagctaggtaagtactacatcttcgacgacactccaattgccaaggctttgtacagaaactggagagaatgtaaattcgtcgaagacgaaggtgatgttgttttctacaagcactaa

SEQ ID NO: 507 - DNA, 1212 bp, Artificial sequence
  Delta-15 Desaturase
atggcccctccacacgtcgtcgacgaacaagttagaagaagaatcgttgttgaagacgagattaagtcaaagaaacaattcgagagaaactacgtcccaatggatttcactatcaaggaaatcagagacgctatccctgctcacttattcatcagagacacaactaagtcaattctacacgttgtcaaagatttggttaccattgccattgttttctactgtgctaccttcatcgaaactttgccatccttggctttgagagttccagcatggatcacctactggattattcaaggtaccgtcatggttggtccatggattttggctcacgaatgtggtcacggtgccttttctcaatacacgtcgttcaacaccattatcggttgggtcttgcattccgctttgttggttccttatcaggcatgggcaatgtcacactctaagcaccacaaggatactggtagtatgacgaaggatgtggtcttcattccagctactcgttcctacaaaggtctacctgccctagaaaagcctgctgttgaagaagaagtttctgaacaagaacatcaccaccatgaagaatccatctttgctgaaaccccaatctacactttgggtgccttgttgttcgttttaaccttcggttggccattgtacctaattgttaacttctctggtcacgaagccccacactgggtcaaccacttccaaactgttgctccattgtacgaaccacaccaaagaaagaacatcttttactctaactgtggtattgttgctatgggctctattttgacctatttgtccatggttttctctccattaactgttttcatgtactacggtatcccatacttgggtgttaatgcttggattgtttgcattacttacttacaacacactgatccaaaggttcctcacttcagagacaacgaatggaattttcaaagaggtgccgcttgtaccatcgatagatccttcggtactattgtcaaccacttgcaccaccacatcggcgattcccaccaatgtcaccacatgttctctcaaatgccattctacaatgctgtcgaagctactaagtatctaaaggccaagctaggtaagtactacatcttcgacgacactccaattgccaaggctttgtacagaaactggagagaatgtaaattcgtcgaagacgaaggtgatgttgttttctacaagcactaa

SEQ ID NO: 508 - DNA, 1212 bp, Artificial sequence
  Delta-15 Desaturase
atggcccctccacacgtcgtcgacgaacaagttagaagaagaatcgttgttgaagacgagattaagtcaaagaaacaattcgagagaaactacgtcccaatggatttcactatcaaggaaatcagagacgctatccctgctcacttattcatcagagacacaactaagtcaattctacacgttgtcaaagatttggttaccattgccattgttttctactgtgctaccttcatcgaaactttgccatccttggctttgagagttccagcatggatcacctactggattattcaaggtaccgtcatggttggtccatggattttggctcacgaatgtggtcacggtgccttttctaatcacacgtcgttcaactccattttcggttgggtcttgcattccgctttgttggttccttatcaggcatgggcaatgtcacactctaagcaccacaagtgtactggttccatgactaaggatgttgtcttcattccagctactcgttcctacaaaggtctacctgccctagaaaagcctgctgttgaagaagaagtttctgaacaagaacatcaccaccatgaagaatccatctttgctgaaaccccaatctacactttgggtgccttgttgttcgttttaaccttcggttggccattgtacctaattgttaacttctctggtcacgaagccccacactgggtcaaccacttccaaactgttgctccattgtacgaaccacaccaaagaaagaacatcttttactctaactgtggtattgttgctatgggctctattttgacctatttgtccatggttttctctccattaactgttttcatgtactacggtatcccatacttgggtgttaatgcttggattgtttgcattacttacttacaacacactgatccaaaggttcctcacttcagagacaacgaatggaattttcaaagaggtgccgcttgtaccatcgatagatccttcggtactattgtcaaccacttgcaccaccacatcggcgattcccaccaatgtcaccacatgttctctcaaatgccattctacaatgctgtcgaagctactaagtatctaaaggccaagctaggtaagtactacatcttcgacgacactccaattgccaaggctttgtacagaaactggagagaatgtaaattcgtcgaagacgaaggtgatgttgttttctacaagcactaa

SEQ ID NO: 509 - DNA, 1212 bp, Artificial sequence
  Delta-15 Desaturase
atggcccctccacacgtcgtcgacgaacaagttagaagaagaatcgttgttgaagacgagattaagtcaaagaaacaattcgagagaaactacgtcccaatggatttcactatcaaggaaatcagagacgctatccctgctcacttattcatcagagacacaactaagtcaattctacacgttgtcaaagatttggttaccattgccattgttttctactgtgctaccttcatcgaaactttgccatccttggctttgagagttccagcatggatcacctactggattattcaaggtaccgtcatggttggtccatggattttggctcacgaatgtggtcacggtgccttttctcaacccaggtggttcaactacattatcggttgggtcttgcattccgctttgttggttccttatcaggcatgggcaatgtcacactctaagcaccacaagggtactggttccatgactaaggatgttgtcttcattccagctactcgttcctacaaaggtctacctgccctagaaaagcctgctgttgaagaagaagtttctgaacaagaacatcaccaccatgaagaatccatctttgctgaaaccccaatctacactttgggtgccttgttgttcgttttaaccttcggttggccattgtacctaattgttaacttctctggtcacgaagccccacactgggtcaaccacttccaaactgttgctccattgtacgaaccacaccaaagaaagaacatcttttactctaactgtggtattgttgctatgggctctattttgacctatttgtccatggttttctctccattaactgttttcatgtactacggtatcccatacttgggtgttaatgcttggattgtttgcattacttacttacaacacactgatccaaaggttcctcacttcagagacaacgaatggaattttcaaagaggtgccgcttgtaccatcgatagatccttcggtactattgtcaaccacttgcaccaccacatcggcgattcccaccaatgtcaccacatgttctctcaaatgccattctacaatgctgtcgaagctactaagtatctaaaggccaagctaggtaagtactacatcttcgacgacactccaattgccaaggctttgtacagaaactggagagaatgtaaattcgtcgaagacgaaggtgatgttgttttctacaagcactaa

SEQ ID NO: 510 - DNA, 1212 bp, Artificial sequence
  Delta-15 Desaturase
atggcccctccacacgtcgtcgacgaacaagttagaagaagaatcgttgttgaagacgagattaagtcaaagaaacaattcgagagaaactacgtcccaatggatttcactatcaaggaaatcagagacgctatccctgctcacttattcatcagagacacaactaagtcaattctacacgttgtcaaagatttggttaccattgccattgttttctactgtgctaccttcatcgaaactttgccatccttggctttgagagttccagcatggatcacctactggattattcaaggtaccgtcatggttggtccatggattttggctcacgaatgtggtcacggtgccttttctcaacccacgtggatcaactacattatcggttgggtcttgcattccgctttgttggttccttatcaggcatgggcaatgtcacactctaagcaccacaagggtactggttccatgactaaggatgttgtcttcattccagctactcgttcctacaaaggtctacctgccctagaaaagcctgctgttgaagaagaagtttctgaacaagaacatcaccaccatgaagaatccatctttgctgaaaccccaatctacactttgggtgccttgttgttcgttttaaccttcggttggccattgtacctaattgttaacttctctggtcacgaagccccacactgggtcaaccacttccaaactgttgctccattgtacgaaccacaccaaagaaagaacatcttttactctaactgtggtattgttgctatgggctctattttgacctatttgtccatggttttctctccattaactgttttcatgtactacggtatcccatacttgggtgttaatgcttggattgtttgcattacttacttacaacacactgatccaaaggttcctcacttcagagacaacgaatggaattttcaaagaggtgccgcttgtaccatcgatagatccttcggtactattgtcaaccacttgcaccaccacatcggcgattcccaccaatgtcaccacatgttctctcaaatgccattctacaatgctgtcgaagctactaagtatctaaaggccaagctaggtaagtactacatcttcgacgacactccaattgccaaggctttgtacagaaactggagagaatgtaaattcgtcgaagacgaaggtgatgttgttttctacaagcactaa

SEQ ID NO: 511 - DNA, 1212 bp, Artificial sequence
  Delta-15 Desaturase
atggcccctccacacgtcgtcgacgaacaagttagaagaagaatcgttgttgaagacgagattaagtcaaagaaacaattcgagagaaactacgtcccaatggatttcactatcaaggaaatcagagacgctatccctgctcacttattcatcagagacacaactaagtcaattctacacgttgtcaaagatttggttaccattgccattgttttctactgtgctaccttcatcgaaactttgccatccttggctttgagagttccagcatggatcacctactggattattcaaggtaccgtcatggttggtccatggattttggctcacgaatgtggtcacggtgccttttctaagcccaagaggatcaactacattttgggttgggtcttgcattccgctttgttggttccttatcaggcatgggcaatgtcacactctaagcaccacaagggtactggttccatgactaaggatgttgtcttcattccagctactcgttcctacaaaggtctacctgccctagaaaagcctgctgttgaagaagaagtttctgaacaagaacatcaccaccatgaagaatccatctttgctgaaaccccaatctacactttgggtgccttgttgttcgttttaaccttcggttggccattgtacctaattgttaacttctctggtcacgaagccccacactgggtcaaccacttccaaactgttgctccattgtacgaaccacaccaaagaaagaacatcttttactctaactgtggtattgttgctatgggctctattttgacctatttgtccatggttttctctccattaactgttttcatgtactacggtatcccatacttgggtgttaatgcttggattgtttgcattacttacttacaacacactgatccaaaggttcctcacttcagagacaacgaatggaattttcaaagaggtgccgcttgtaccatcgatagatccttcggtactattgtcaaccacttgcaccaccacatcggcgattcccaccaatgtcaccacatgttctctcaaatgccattctacaatgctgtcgaagctactaagtatctaaaggccaagctaggtaagtactacatcttcgacgacactccaattgccaaggctttgtacagaaactggagagaatgtaaattcgtcgaagacgaaggtgatgttgttttctacaagcactaa

SEQ ID NO: 512 - DNA, 1212 bp, Artificial sequence
  Delta-15 Desaturase
atggcccctccacacgtcgtcgacgaacaagttagaagaagaatcgttgttgaagacgagattaagtcaaagaaacaattcgagagaaactacgtcccaatggatttcactatcaaggaaatcagagacgctatccctgctcacttattcatcagagacacaactaagtcaattctacacgttgtcaaagatttggttaccattgccattgttttctactgtgctaccttcatcgaaactttgccatccttggctttgagagttccagcatggatcacctactggattattcaaggtaccgtcatggttggtccatggattttggctcacgaatgtggtcacggtgccttttctaatcccaggtggttcaactccattatcggttgggtcttgcattccgctttgttggttccttatcaggcatgggcaatgtcacactctaagcaccacaagggtactggttccatgactaaggatgttgtcttcattccagctactcgttcctacaaaggtctacctgccctagaaaagcctgctgttgaagaagaagtttctgaacaagaacatcaccaccatgaagaatccatctttgctgaaaccccaatctacactttgggtgccttgttgttcgttttaaccttcggttggccattgtacctaattgttaacttctctggtcacgaagccccacactgggtcaaccacttccaaactgttgctccattgtacgaaccacaccaaagaaagaacatcttttactctaactgtggtattgttgctatgggctctattttgacctatttgtccatggttttctctccattaactgttttcatgtactacggtatcccatacttgggtgttaatgcttggattgtttgcattacttacttacaacacactgatccaaaggttcctcacttcagagacaacgaatggaattttcaaagaggtgccgcttgtaccatcgatagatccttcggtactattgtcaaccacttgcaccaccacatcggcgattcccaccaatgtcaccacatgttctctcaaatgccattctacaatgctgtcgaagctactaagtatctaaaggccaagctaggtaagtactacatcttcgacgacactccaattgccaaggctttgtacagaaactggagagaatgtaaattcgtcgaagacgaaggtgatgttgttttctacaagcactaa

SEQ ID NO: 513 - DNA, 1212 bp, Artificial sequence
  Delta-15 Desaturase
atggcccctccacacgtcgtcgacgaacaagttagaagaagaatcgttgttgaagacgagattaagtcaaagaaacaattcgagagaaactacgtcccaatggatttcactatcaaggaaatcagagacgctatccctgctcacttattcatcagagacacaactaagtcaattctacacgttgtcaaagatttggttaccattgccattgttttctactgtgctaccttcatcgaaactttgccatccttggctttgagagttccagcatggatcacctactggattattcaaggtaccgtcatggttggtccatggattttggctcacgaatgtggtcacggtgccttttctgaatacacgtcgatcaacaccattatcggttgggtcttgcattccgctttgttggttccttatcaggcatgggcaatgtcacactctaagcaccacaagtctactggttccatgactaaggatgttgtcttcattccagctactcgttcctacaaaggtctacctgccctagaaaagcctgctgttgaagaagaagtttctgaacaagaacatcaccaccatgaagaatccatctttgctgaaaccccaatctacactttgggtgccttgttgttcgttttaaccttcggttggccattgtacctaattgttaacttctctggtcacgaagccccacactgggtcaaccacttccaaactgttgctccattgtacgaaccacaccaaagaaagaacatcttttactctaactgtggtattgttgctatgggctctattttgacctatttgtccatggttttctctccattaactgttttcatgtactacggtatcccatacttgggtgttaatgcttggattgtttgcattacttacttacaacacactgatccaaaggttcctcacttcagagacaacgaatggaattttcaaagaggtgccgcttgtaccatcgatagatccttcggtactattgtcaaccacttgcaccaccacatcggcgattcccaccaatgtcaccacatgttctctcaaatgccattctacaatgctgtcgaagctactaagtatctaaaggccaagctaggtaagtactacatcttcgacgacactccaattgccaaggctttgtacagaaactggagagaatgtaaattcgtcgaagacgaaggtgatgttgttttctacaagcactaa

SEQ ID NO: 514 - DNA, 1212 bp, Artificial sequence
  Delta-15 Desaturase
atggcccctccacacgtcgtcgacgaacaagttagaagaagaatcgttgttgaagacgagattaagtcaaagaaacaattcgagagaaactacgtcccaatggatttcactatcaaggaaatcagagacgctatccctgctcacttattcatcagagacacaactaagtcaattctacacgttgtcaaagatttggttaccattgccattgttttctactgtgctaccttcatcgaaactttgccatccttggctttgagagttccagcatggatcacctactggattattcaaggtaccgtcatggttggtccatggattttggctcacgaatgtggtcacggtgccttttctaattccaagtggttcaacaacattatcggttgggtcttgcattccgctttgttggttccttatcaggcatgggcaatgtcacactctaagcaccacaagggtactggttccatgactaaggatttcgtcttcattccagctactcgttcctacaaaggtctacctgccctagaaaagcctgctgttgaagaagaagtttctgaacaagaacatcaccaccatgaagaatccatctttgctgaaaccccaatctacactttgggtgccttgttgttcgttttaaccttcggttggccattgtacctaattgttaacttctctggtcacgaagccccacactgggtcaaccacttccaaactgttgctccattgtacgaaccacaccaaagaaagaacatcttttactctaactgtggtattgttgctatgggctctattttgacctatttgtccatggttttctctccattaactgttttcatgtactacggtatcccatacttgggtgttaatgcttggattgtttgcattacttacttacaacacactgatccaaaggttcctcacttcagagacaacgaatggaattttcaaagaggtgccgcttgtaccatcgatagatccttcggtactattgtcaaccacttgcaccaccacatcggcgattcccaccaatgtcaccacatgttctctcaaatgccattctacaatgctgtcgaagctactaagtatctaaaggccaagctaggtaagtactacatcttcgacgacactccaattgccaaggctttgtacagaaactggagagaatgtaaattcgtcgaagacgaaggtgatgttgttttctacaagcactaa

SEQ ID NO: 515 - DNA, 1212 bp, Artificial sequence
  Delta-15 Desaturase
atggcccctccacacgtcgtcgacgaacaagttagaagaagaatcgttgttgaagacgagattaagtcaaagaaacaattcgagagaaactacgtcccaatggatttcactatcaaggaaatcagagacgctatccctgctcacttattcatcagagacacaactaagtcaattctacacgttgtcaaagatttggttaccattgccattgttttctactgtgctaccttcatcgaaactttgccatccttggctttgagagttccagcatggatcacctactggattattcaaggtaccgtcatggttggtccatggattttggctcacgaatgtggtcacggtgccttttctaattccacgacgttcaacaacattttcggttgggtcttgcattccgctttgttggttccttatcaggcatgggcaatgtcacactctaagcaccacaaggttactggttccatgactaaggatgttgtcttcattccagctactcgttcctacaaaggtctacctgccctagaaaagcctgctgttgaagaagaagtttctgaacaagaacatcaccaccatgaagaatccatctttgctgaaaccccaatctacactttgggtgccttgttgttcgttttaaccttcggttggccattgtacctaattgttaacttctctggtcacgaagccccacactgggtcaaccacttccaaactgttgctccattgtacgaaccacaccaaagaaagaacatcttttactctaactgtggtattgttgctatgggctctattttgacctatttgtccatggttttctctccattaactgttttcatgtactacggtatcccatacttgggtgttaatgcttggattgtttgcattacttacttacaacacactgatccaaaggttcctcacttcagagacaacgaatggaattttcaaagaggtgccgcttgtaccatcgatagatccttcggtactattgtcaaccacttgcaccaccacatcggcgattcccaccaatgtcaccacatgttctctcaaatgccattctacaatgctgtcgaagctactaagtatctaaaggccaagctaggtaagtactacatcttcgacgacactccaattgccaaggctttgtacagaaactggagagaatgtaaattcgtcgaagacgaaggtgatgttgttttctacaagcactaa

SEQ ID NO: 516 - DNA, 1212 bp, Artificial sequence
  Delta-15 Desaturase
atggcccctccacacgtcgtcgacgaacaagttagaagaagaatcgttgttgaagacgagattaagtcaaagaaacaattcgagagaaactacgtcccaatggatttcactatcaaggaaatcagagacgctatccctgctcacttattcatcagagacacaactaagtcaattctacacgttgtcaaagatttggttaccattgccattgttttctactgtgctaccttcatcgaaactttgccatccttggctttgagagttccagcatggatcacctactggattattcaaggtaccgtcatggttggtccatggattttggctcacgaatgtggtcacggtgccttttctgaatccaagtggttcaacaacattttcggttgggtcttgcattccgctttgttggttccttatcaggcatgggcaatgtcacactctaagcaccacaagggtactggttccatgactaaggatgttgtcttcattccagctactcgttcctacaaaggtctacctgccctagaaaagcctgctgttgaagaagaagtttctgaacaagaacatcaccaccatgaagaatccatctttgctgaaaccccaatctacactttgggtgccttgttgttcgttttaaccttcggttggccattgtacctaattgttaacttctctggtcacgaagccccacactgggtcaaccacttccaaactgttgctccattgtacgaaccacaccaaagaaagaacatcttttactctaactgtggtattgttgctatgggctctattttgacctatttgtccatggttttctctccattaactgttttcatgtactacggtatcccatacttgggtgttaatgcttggattgtttgcattacttacttacaacacactgatccaaaggttcctcacttcagagacaacgaatggaattttcaaagaggtgccgcttgtaccatcgatagatccttcggtactattgtcaaccacttgcaccaccacatcggcgattcccaccaatgtcaccacatgttctctcaaatgccattctacaatgctgtcgaagctactaagtatctaaaggccaagctaggtaagtactacatcttcgacgacactccaattgccaaggctttgtacagaaactggagagaatgtaaattcgtcgaagacgaaggtgatgttgttttctacaagcactaa

SEQ ID NO: 517 - DNA, 1212 bp, Artificial sequence
  Delta-15 Desaturase
atggcccctccacacgtcgtcgacgaacaagttagaagaagaatcgttgttgaagacgagattaagtcaaagaaacaattcgagagaaactacgtcccaatggatttcactatcaaggaaatcagagacgctatccctgctcacttattcatcagagacacaactaagtcaattctacacgttgtcaaagatttggttaccattgccattgttttctactgtgctaccttcatcgaaactttgccatccttggctttgagagttccagcatggatcacctactggattattcaaggtaccgtcatggttggtccatggattttggctcacgaatgtggtcacggtgccttttctgattacaagaggatcaacaccattatgggttgggtcttgcattccgctttgttggttccttatcaggcatgggcaatgtcacactctaagcaccacaaggatactggttccatgactaaggatgttgtcttcattccagctactcgttcctacaaaggtctacctgccctagaaaagcctgctgttgaagaagaagtttctgaacaagaacatcaccaccatgaagaatccatctttgctgaaaccccaatctacactttgggtgccttgttgttcgttttaaccttcggttggccattgtacctaattgttaacttctctggtcacgaagccccacactgggtcaaccacttccaaactgttgctccattgtacgaaccacaccaaagaaagaacatcttttactctaactgtggtattgttgctatgggctctattttgacctatttgtccatggttttctctccattaactgttttcatgtactacggtatcccatacttgggtgttaatgcttggattgtttgcattacttacttacaacacactgatccaaaggttcctcacttcagagacaacgaatggaattttcaaagaggtgccgcttgtaccatcgatagatccttcggtactattgtcaaccacttgcaccaccacatcggcgattcccaccaatgtcaccacatgttctctcaaatgccattctacaatgctgtcgaagctactaagtatctaaaggccaagctaggtaagtactacatcttcgacgacactccaattgccaaggctttgtacagaaactggagagaatgtaaattcgtcgaagacgaaggtgatgttgttttctacaagcactaa

SEQ ID NO: 518 - DNA, 1212 bp, Artificial sequence
  Delta-15 Desaturase
atggcccctccacacgtcgtcgacgaacaagttagaagaagaatcgttgttgaagacgagattaagtcaaagaaacaattcgagagaaactacgtcccaatggatttcactatcaaggaaatcagagacgctatccctgctcacttattcatcagagacacaactaagtcaattctacacgttgtcaaagatttggttaccattgccattgttttctactgtgctaccttcatcgaaactttgccatccttggctttgagagttccagcatggatcacctactggattattcaaggtaccgtcatggttggtccatggattttggctcacgaatgtggtcacggtgccttttctaaacacaagaggttcaactccattttcggttgggtcttgcattccgctttgttggttccttatcaggcatgggcaatgtcacactctaagcaccacaagggtactggttccatgactaaggatgttgtcttcattccagctactcgttcctacaaaggtctacctgccctagaaaagcctgctgttgaagaagaagtttctgaacaagaacatcaccaccatgaagaatccatctttgctgaaaccccaatctacactttgggtgccttgttgttcgttttaaccttcggttggccattgtacctaattgttaacttctctggtcacgaagccccacactgggtcaaccacttccaaactgttgctccattgtacgaaccacaccaaagaaagaacatcttttactctaactgtggtattgttgctatgggctctattttgacctatttgtccatggttttctctccattaactgttttcatgtactacggtatcccatacttgggtgttaatgcttggattgtttgcattacttacttacaacacactgatccaaaggttcctcacttcagagacaacgaatggaattttcaaagaggtgccgcttgtaccatcgatagatccttcggtactattgtcaaccacttgcaccaccacatcggcgattcccaccaatgtcaccacatgttctctcaaatgccattctacaatgctgtcgaagctactaagtatctaaaggccaagctaggtaagtactacatcttcgacgacactccaattgccaaggctttgtacagaaactggagagaatgtaaattcgtcgaagacgaaggtgatgttgttttctacaagcactaa

SEQ ID NO: 519 - DNA, 1212 bp, Artificial sequence
  Delta-15 Desaturase
atggcccctccacacgtcgtcgacgaacaagttagaagaagaatcgttgttgaagacgagattaagtcaaagaaacaattcgagagaaactacgtcccaatggatttcactatcaaggaaatcagagacgctatccctgctcacttattcatcagagacacaactaagtcaattctacacgttgtcaaagatttggttaccattgccattgttttctactgtgctaccttcatcgaaactttgccatccttggctttgagagttccagcatggatcacctactggattattcaaggtaccgtcatggttggtccatggattttggctcacgaatgtggtcacggtgccttttctaaatacaagtcgatcaacaccattatcggttgggtcttgcattccgctttgttggttccttatcaggcatgggcaatgtcacactctaagcaccacaagggtactggtgatatggcgaaggatttcgtcttcattccagctactcgttcctacaaaggtctacctgccctagaaaagcctgctgttgaagaagaagtttctgaacaagaacatcaccaccatgaagaatccatctttgctgaaaccccaatctacactttgggtgccttgttgttcgttttaaccttcggttggccattgtacctaattgttaacttctctggtcacgaagccccacactgggtcaaccacttccaaactgttgctccattgtacgaaccacaccaaagaaagaacatcttttactctaactgtggtattgttgctatgggctctattttgacctatttgtccatggttttctctccattaactgttttcatgtactacggtatcccatacttgggtgttaatgcttggattgtttgcattacttacttacaacacactgatccaaaggttcctcacttcagagacaacgaatggaattttcaaagaggtgccgcttgtaccatcgatagatccttcggtactattgtcaaccacttgcaccaccacatcggcgattcccaccaatgtcaccacatgttctctcaaatgccattctacaatgctgtcgaagctactaagtatctaaaggccaagctaggtaagtactacatcttcgacgacactccaattgccaaggctttgtacagaaactggagagaatgtaaattcgtcgaagacgaaggtgatgttgttttctacaagcactaa

SEQ ID NO: 520 - DNA, 1212 bp, Artificial sequence
  Delta-15 Desaturase
atggcccctccacacgtcgtcgacgaacaagttagaagaagaatcgttgttgaagacgagattaagtcaaagaaacaattcgagagaaactacgtcccaatggatttcactatcaaggaaatcagagacgctatccctgctcacttattcatcagagacacaactaagtcaattctacacgttgtcaaagatttggttaccattgccattgttttctactgtgctaccttcatcgaaactttgccatccttggctttgagagttccagcatggatcacctactggattattcaaggtaccgtcatggttggtccatggattttggctcacgaatgtggtcacggtgccttttctcagcccaagtggttcaacaccattttgggttgggtcttgcattccgctttgttggttccttatcaggcatgggcaatgtcacactctaagcaccacaagggtactggttccatgactaaggatgttgtcttcattccagctactcgttcctacaaaggtctacctgccctagaaaagcctgctgttgaagaagaagtttctgaacaagaacatcaccaccatgaagaatccatctttgctgaaaccccaatctacactttgggtgccttgttgttcgttttaaccttcggttggccattgtacctaattgttaacttctctggtcacgaagccccacactgggtcaaccacttccaaactgttgctccattgtacgaaccacaccaaagaaagaacatcttttactctaactgtggtattgttgctatgggctctattttgacctatttgtccatggttttctctccattaactgttttcatgtactacggtatcccatacttgggtgttaatgcttggattgtttgcattacttacttacaacacactgatccaaaggttcctcacttcagagacaacgaatggaattttcaaagaggtgccgcttgtaccatcgatagatccttcggtactattgtcaaccacttgcaccaccacatcggcgattcccaccaatgtcaccacatgttctctcaaatgccattctacaatgctgtcgaagctactaagtatctaaaggccaagctaggtaagtactacatcttcgacgacactccaattgccaaggctttgtacagaaactggagagaatgtaaattcgtcgaagacgaaggtgatgttgttttctacaagcactaa

SEQ ID NO: 521 - DNA, 1212 bp, Artificial sequence
  Delta-15 Desaturase
atggcccctccacacgtcgtcgacgaacaagttagaagaagaatcgttgttgaagacgagattaagtcaaagaaacaattcgagagaaactacgtcccaatggatttcactatcaaggaaatcagagacgctatccctgctcacttattcatcagagacacaactaagtcaattctacacgttgtcaaagatttggttaccattgccattgttttctactgtgctaccttcatcgaaactttgccatccttggctttgagagttccagcatggatcacctactggattattcaaggtaccgtcatggttggtccatggattttggctcacgaatgtggtcacggtgccttttctaatcacacgaggttcaactccattatcggttgggtcttgcattccgctttgttggttccttatcaggcatgggcaatgtcacactctaagcaccacaagtttactggtgatatggcgaaggatgtcgtcttcattccagctactcgttcctacaaaggtctacctgccctagaaaagcctgctgttgaagaagaagtttctgaacaagaacatcaccaccatgaagaatccatctttgctgaaaccccaatctacactttgggtgccttgttgttcgttttaaccttcggttggccattgtacctaattgttaacttctctggtcacgaagccccacactgggtcaaccacttccaaactgttgctccattgtacgaaccacaccaaagaaagaacatcttttactctaactgtggtattgttgctatgggctctattttgacctatttgtccatggttttctctccattaactgttttcatgtactacggtatcccatacttgggtgttaatgcttggattgtttgcattacttacttacaacacactgatccaaaggttcctcacttcagagacaacgaatggaattttcaaagaggtgccgcttgtaccatcgatagatccttcggtactattgtcaaccacttgcaccaccacatcggcgattcccaccaatgtcaccacatgttctctcaaatgccattctacaatgctgtcgaagctactaagtatctaaaggccaagctaggtaagtactacatcttcgacgacactccaattgccaaggctttgtacagaaactggagagaatgtaaattcgtcgaagacgaaggtgatgttgttttctacaagcactaa

SEQ ID NO: 522 - DNA, 1212 bp, Artificial sequence
  Delta-15 Desaturase
atggcccctccacacgtcgtcgacgaacaagttagaagaagaatcgttgttgaagacgagattaagtcaaagaaacaattcgagagaaactacgtcccaatggatttcactatcaaggaaatcagagacgctatccctgctcacttattcatcagagacacaactaagtcaattctacacgttgtcaaagatttggttaccattgccattgttttctactgtgctaccttcatcgaaactttgccatccttggctttgagagttccagcatggatcacctactggattattcaaggtaccgtcatggttggtccatggattttggctcacgaatgtggtcacggtgccttttctgactacaggtggttcaactccattatcggttgggtcttgcattccgctttgttggttccttatcaggcatgggcaatgtcacactctaagcaccacaagggtactggtcatatggagaaggatttggtcttcattccagctactcgttcctacaaaggtctacctgccctagaaaagcctgctgttgaagaagaagtttctgaacaagaacatcaccaccatgaagaatccatctttgctgaaaccccaatctacactttgggtgccttgttgttcgttttaaccttcggttggccattgtacctaattgttaacttctctggtcacgaagccccacactgggtcaaccacttccaaactgttgctccattgtacgaaccacaccaaagaaagaacatcttttactctaactgtggtattgttgctatgggctctattttgacctatttgtccatggttttctctccattaactgttttcatgtactacggtatcccatacttgggtgttaatgcttggattgtttgcattacttacttacaacacactgatccaaaggttcctcacttcagagacaacgaatggaattttcaaagaggtgccgcttgtaccatcgatagatccttcggtactattgtcaaccacttgcaccaccacatcggcgattcccaccaatgtcaccacatgttctctcaaatgccattctacaatgctgtcgaagctactaagtatctaaaggccaagctaggtaagtactacatcttcgacgacactccaattgccaaggctttgtacagaaactggagagaatgtaaattcgtcgaagacgaaggtgatgttgttttctacaagcactaa

SEQ ID NO: 523 - DNA, 1212 bp, Artificial sequence
  Delta-15 Desaturase
atggcccctccacacgtcgtcgacgaacaagttagaagaagaatcgttgttgaagacgagattaagtcaaagaaacaattcgagagaaactacgtcccaatggatttcactatcaaggaaatcagagacgctatccctgctcacttattcatcagagacacaactaagtcaattctacacgttgtcaaagatttggttaccattgccattgttttctactgtgctaccttcatcgaaactttgccatccttggctttgagagttccagcatggatcacctactggattattcaaggtaccgtcatggttggtccatggattttggctcacgaatgtggtcacggtgccttttctcaatacaagacgttcaacaacattttgggttgggtcttgcattccgctttgttggttccttatcaggcatgggcaatgtcacactctaagcaccacaagggtactggtgctatgacgaaggatttggtcttcattccagctactcgttcctacaaaggtctacctgccctagaaaagcctgctgttgaagaagaagtttctgaacaagaacatcaccaccatgaagaatccatctttgctgaaaccccaatctacactttgggtgccttgttgttcgttttaaccttcggttggccattgtacctaattgttaacttctctggtcacgaagccccacactgggtcaaccacttccaaactgttgctccattgtacgaaccacaccaaagaaagaacatcttttactctaactgtggtattgttgctatgggctctattttgacctatttgtccatggttttctctccattaactgttttcatgtactacggtatcccatacttgggtgttaatgcttggattgtttgcattacttacttacaacacactgatccaaaggttcctcacttcagagacaacgaatggaattttcaaagaggtgccgcttgtaccatcgatagatccttcggtactattgtcaaccacttgcaccaccacatcggcgattcccaccaatgtcaccacatgttctctcaaatgccattctacaatgctgtcgaagctactaagtatctaaaggccaagctaggtaagtactacatcttcgacgacactccaattgccaaggctttgtacagaaactggagagaatgtaaattcgtcgaagacgaaggtgatgttgttttctacaagcactaa

SEQ ID NO: 524 - DNA, 1212 bp, Artificial sequence
  Delta-15 Desaturase
atggcccctccacacgtcgtcgacgaacaagttagaagaagaatcgttgttgaagacgagattaagtcaaagaaacaattcgagagaaactacgtcccaatggatttcactatcaaggaaatcagagacgctatccctgctcacttattcatcagagacacaactaagtcaattctacacgttgtcaaagatttggttaccattgccattgttttctactgtgctaccttcatcgaaactttgccatccttggctttgagagttccagcatggatcacctactggattattcaaggtaccgtcatggttggtccatggattttggctcacgaatgtggtcacggtgccttttctaattacaagtcgatcaactccattttgggttgggtcttgcattccgctttgttggttccttatcaggcatgggcaatgtcacactctaagcaccacaagtctactggtagtatgacgaaggatctcgtcttcattccagctactcgttcctacaaaggtctacctgccctagaaaagcctgctgttgaagaagaagtttctgaacaagaacatcaccaccatgaagaatccatctttgctgaaaccccaatctacactttgggtgccttgttgttcgttttaaccttcggttggccattgtacctaattgttaacttctctggtcacgaagccccacactgggtcaaccacttccaaactgttgctccattgtacgaaccacaccaaagaaagaacatcttttactctaactgtggtattgttgctatgggctctattttgacctatttgtccatggttttctctccattaactgttttcatgtactacggtatcccatacttgggtgttaatgcttggattgtttgcattacttacttacaacacactgatccaaaggttcctcacttcagagacaacgaatggaattttcaaagaggtgccgcttgtaccatcgatagatccttcggtactattgtcaaccacttgcaccaccacatcggcgattcccaccaatgtcaccacatgttctctcaaatgccattctacaatgctgtcgaagctactaagtatctaaaggccaagctaggtaagtactacatcttcgacgacactccaattgccaaggctttgtacagaaactggagagaatgtaaattcgtcgaagacgaaggtgatgttgttttctacaagcactaa

SEQ ID NO: 525 - DNA, 1212 bp, Artificial sequence
  Delta-15 Desaturase
atggcccctccacacgtcgtcgacgaacaagttagaagaagaatcgttgttgaagacgagattaagtcaaagaaacaattcgagagaaactacgtcccaatggatttcactatcaaggaaatcagagacgctatccctgctcacttattcatcagagacacaactaagtcaattctacacgttgtcaaagatttggttaccattgccattgttttctactgtgctaccttcatcgaaactttgccatccttggctttgagagttccagcatggatcacctactggattattcaaggtaccgtcatggttggtccatggattttggctcacgaatgtggtcacggtgccttttctaatcccacgtggatcaactacattttcggttgggtcttgcattccgctttgttggttccttatcaggcatgggcaatgtcacactctaagcaccacaagtgtactggtaatatggcgaaggatatcgtcttcattccagctactcgttcctacaaaggtctacctgccctagaaaagcctgctgttgaagaagaagtttctgaacaagaacatcaccaccatgaagaatccatctttgctgaaaccccaatctacactttgggtgccttgttgttcgttttaaccttcggttggccattgtacctaattgttaacttctctggtcacgaagccccacactgggtcaaccacttccaaactgttgctccattgtacgaaccacaccaaagaaagaacatcttttactctaactgtggtattgttgctatgggctctattttgacctatttgtccatggttttctctccattaactgttttcatgtactacggtatcccatacttgggtgttaatgcttggattgtttgcattacttacttacaacacactgatccaaaggttcctcacttcagagacaacgaatggaattttcaaagaggtgccgcttgtaccatcgatagatccttcggtactattgtcaaccacttgcaccaccacatcggcgattcccaccaatgtcaccacatgttctctcaaatgccattctacaatgctgtcgaagctactaagtatctaaaggccaagctaggtaagtactacatcttcgacgacactccaattgccaaggctttgtacagaaactggagagaatgtaaattcgtcgaagacgaaggtgatgttgttttctacaagcactaa

SEQ ID NO: 526 - DNA, 1212 bp, Artificial sequence
  Delta-15 Desaturase
atggcccctccacacgtcgtcgacgaacaagttagaagaagaatcgttgttgaagacgagattaagtcaaagaaacaattcgagagaaactacgtcccaatggatttcactatcaaggaaatcagagacgctatccctgctcacttattcatcagagacacaactaagtcaattctacacgttgtcaaagatttggttaccattgccattgttttctactgtgctaccttcatcgaaactttgccatccttggctttgagagttccagcatggatcacctactggattattcaaggtaccgtcatggttggtccatggattttggctcacgaatgtggtcacggtgccttttctcatcccaagaggttcaactccattttcggttgggtcttgcattccgctttgttggttccttatcaggcatgggcaatgtcacactctaagcaccacaagggtactggttccatgactaaggatgttgtcttcattccagctactcgttcctacaaaggtctacctgccctagaaaagcctgctgttgaagaagaagtttctgaacaagaacatcaccaccatgaagaatccatctttgctgaaaccccaatctacactttgggtgccttgttgttcgttttaaccttcggttggccattgtacctaattgttaacttctctggtcacgaagccccacactgggtcaaccacttccaaactgttgctccattgtacgaaccacaccaaagaaagaacatcttttactctaactgtggtattgttgctatgggctctattttgacctatttgtccatggttttctctccattaactgttttcatgtactacggtatcccatacttgggtgttaatgcttggattgtttgcattacttacttacaacacactgatccaaaggttcctcacttcagagacaacgaatggaattttcaaagaggtgccgcttgtaccatcgatagatccttcggtactattgtcaaccacttgcaccaccacatcggcgattcccaccaatgtcaccacatgttctctcaaatgccattctacaatgctgtcgaagctactaagtatctaaaggccaagctaggtaagtactacatcttcgacgacactccaattgccaaggctttgtacagaaactggagagaatgtaaattcgtcgaagacgaaggtgatgttgttttctacaagcactaa

SEQ ID NO: 527 - DNA, 1212 bp, Artificial sequence
  Delta-15 Desaturase
atggcccctccacacgtcgtcgacgaacaagttagaagaagaatcgttgttgaagacgagattaagtcaaagaaacaattcgagagaaactacgtcccaatggatttcactatcaaggaaatcagagacgctatccctgctcacttattcatcagagacacaactaagtcaattctacacgttgtcaaagatttggttaccattgccattgttttctactgtgctaccttcatcgaaactttgccatccttggctttgagagttccagcatggatcacctactggattattcaaggtaccgtcatggttggtccatggattttggctcacgaatgtggtcacggtgccttttctgactccaggtcgttcaacaacattttcggttgggtcttgcattccgctttgttggttccttatcaggcatgggcaatgtcacactctaagcaccacaaggatactggtcatatgactaaggatgttgtcttcattccagctactcgttcctacaaaggtctacctgccctagaaaagcctgctgttgaagaagaagtttctgaacaagaacatcaccaccatgaagaatccatctttgctgaaaccccaatctacactttgggtgccttgttgttcgttttaaccttcggttggccattgtacctaattgttaacttctctggtcacgaagccccacactgggtcaaccacttccaaactgttgctccattgtacgaaccacaccaaagaaagaacatcttttactctaactgtggtattgttgctatgggctctattttgacctatttgtccatggttttctctccattaactgttttcatgtactacggtatcccatacttgggtgttaatgcttggattgtttgcattacttacttacaacacactgatccaaaggttcctcacttcagagacaacgaatggaattttcaaagaggtgccgcttgtaccatcgatagatccttcggtactattgtcaaccacttgcaccaccacatcggcgattcccaccaatgtcaccacatgttctctcaaatgccattctacaatgctgtcgaagctactaagtatctaaaggccaagctaggtaagtactacatcttcgacgacactccaattgccaaggctttgtacagaaactggagagaatgtaaattcgtcgaagacgaaggtgatgttgttttctacaagcactaa

SEQ ID NO: 528 - DNA, 1212 bp, Artificial sequence
  Delta-15 Desaturase
atggcccctccacacgtcgtcgacgaacaagttagaagaagaatcgttgttgaagacgagattaagtcaaagaaacaattcgagagaaactacgtcccaatggatttcactatcaaggaaatcagagacgctatccctgctcacttattcatcagagacacaactaagtcaattctacacgttgtcaaagatttggttaccattgccattgttttctactgtgctaccttcatcgaaactttgccatccttggctttgagagttccagcatggatcacctactggattattcaaggtaccgtcatggttggtccatggattttggctcacgaatgtggtcacggtgccttttctgactacacgtggttcaaatccattttcggttgggtcttgcattccgctttgttggttccttatcaggcatgggcaatgtcacactctaagcaccacaagggtactggttccatgactaaggatgttgtcttcattccagctactcgttcctacaaaggtctacctgccctagaaaagcctgctgttgaagaagaagtttctgaacaagaacatcaccaccatgaagaatccatctttgctgaaaccccaatctacactttgggtgccttgttgttcgttttaaccttcggttggccattgtacctaattgttaacttctctggtcacgaagccccacactgggtcaaccacttccaaactgttgctccattgtacgaaccacaccaaagaaagaacatcttttactctaactgtggtattgttgctatgggctctattttgacctatttgtccatggttttctctccattaactgttttcatgtactacggtatcccatacttgggtgttaatgcttggattgtttgcattacttacttacaacacactgatccaaaggttcctcacttcagagacaacgaatggaattttcaaagaggtgccgcttgtaccatcgatagatccttcggtactattgtcaaccacttgcaccaccacatcggcgattcccaccaatgtcaccacatgttctctcaaatgccattctacaatgctgtcgaagctactaagtatctaaaggccaagctaggtaagtactacatcttcgacgacactccaattgccaaggctttgtacagaaactggagagaatgtaaattcgtcgaagacgaaggtgatgttgttttctacaagcactaa

SEQ ID NO: 529 - DNA, 1212 bp, Artificial sequence
  Delta-15 Desaturase
atggcccctccacacgtcgtcgacgaacaagttagaagaagaatcgttgttgaagacgagattaagtcaaagaaacaattcgagagaaactacgtcccaatggatttcactatcaaggaaatcagagacgctatccctgctcacttattcatcagagacacaactaagtcaattctacacgttgtcaaagatttggttaccattgccattgttttctactgtgctaccttcatcgaaactttgccatccttggctttgagagttccagcatggatcacctactggattattcaaggtaccgtcatggttggtccatggattttggctcacgaatgtggtcacggtgccttttctgatcccacgtcgttcaactccattatgggttgggtcttgcattccgctttgttggttccttatcaggcatgggcaatgtcacactctaagcaccacaagggtactggttccatgactaaggatgttgtcttcattccagctactcgttcctacaaaggtctacctgccctagaaaagcctgctgttgaagaagaagtttctgaacaagaacatcaccaccatgaagaatccatctttgctgaaaccccaatctacactttgggtgccttgttgttcgttttaaccttcggttggccattgtacctaattgttaacttctctggtcacgaagccccacactgggtcaaccacttccaaactgttgctccattgtacgaaccacaccaaagaaagaacatcttttactctaactgtggtattgttgctatgggctctattttgacctatttgtccatggttttctctccattaactgttttcatgtactacggtatcccatacttgggtgttaatgcttggattgtttgcattacttacttacaacacactgatccaaaggttcctcacttcagagacaacgaatggaattttcaaagaggtgccgcttgtaccatcgatagatccttcggtactattgtcaaccacttgcaccaccacatcggcgattcccaccaatgtcaccacatgttctctcaaatgccattctacaatgctgtcgaagctactaagtatctaaaggccaagctaggtaagtactacatcttcgacgacactccaattgccaaggctttgtacagaaactggagagaatgtaaattcgtcgaagacgaaggtgatgttgttttctacaagcactaa

SEQ ID NO: 530 - DNA, 1212 bp, Artificial sequence
  Delta-15 Desaturase
atggcccctccacacgtcgtcgacgaacaagttagaagaagaatcgttgttgaagacgagattaagtcaaagaaacaattcgagagaaactacgtcccaatggatttcactatcaaggaaatcagagacgctatccctgctcacttattcatcagagacacaactaagtcaattctacacgttgtcaaagatttggttaccattgccattgttttctactgtgctaccttcatcgaaactttgccatccttggctttgagagttccagcatggatcacctactggattattcaaggtaccgtcatggttggtccatggattttggctcacgaatgtggtcacggtgccttttctcaacacaagtggttcaacaccattttcggttgggtcttgcattccgctttgttggttccttatcaggcatgggcaatgtcacactctaagcaccacaagggtactggttccatgactaaggatgttgtcttcattccagctactcgttcctacaaaggtctacctgccctagaaaagcctgctgttgaagaagaagtttctgaacaagaacatcaccaccatgaagaatccatctttgctgaaaccccaatctacactttgggtgccttgttgttcgttttaaccttcggttggccattgtacctaattgttaacttctctggtcacgaagccccacactgggtcaaccacttccaaactgttgctccattgtacgaaccacaccaaagaaagaacatcttttactctaactgtggtattgttgctatgggctctattttgacctatttgtccatggttttctctccattaactgttttcatgtactacggtatcccatacttgggtgttaatgcttggattgtttgcattacttacttacaacacactgatccaaaggttcctcacttcagagacaacgaatggaattttcaaagaggtgccgcttgtaccatcgatagatccttcggtactattgtcaaccacttgcaccaccacatcggcgattcccaccaatgtcaccacatgttctctcaaatgccattctacaatgctgtcgaagctactaagtatctaaaggccaagctaggtaagtactacatcttcgacgacactccaattgccaaggctttgtacagaaactggagagaatgtaaattcgtcgaagacgaaggtgatgttgttttctacaagcactaa

SEQ ID NO: 531 - DNA, 1212 bp, Artificial sequence
  Delta-15 Desaturase
atggcccctccacacgtcgtcgacgaacaagttagaagaagaatcgttgttgaagacgagattaagtcaaagaaacaattcgagagaaactacgtcccaatggatttcactatcaaggaaatcagagacgctatccctgctcacttattcatcagagacacaactaagtcaattctacacgttgtcaaagatttggttaccattgccattgttttctactgtgctaccttcatcgaaactttgccatccttggctttgagagttccagcatggatcacctactggattattcaaggtaccgtcatggttggtccatggattttggctcacgaatgtggtcacggtgccttttctaatcccaagaggatcaactccattttcggttgggtcttgcattccgctttgttggttccttatcaggcatgggcaatgtcacactctaagcaccacaagggtactggttccatgactaaggatgttgtcttcattccagctactcgttcctacaaaggtctacctgccctagaaaagcctgctgttgaagaagaagtttctgaacaagaacatcaccaccatgaagaatccatctttgctgaaaccccaatctacactttgggtgccttgttgttcgttttaaccttcggttggccattgtacctaattgttaacttctctggtcacgaagccccacactgggtcaaccacttccaaactgttgctccattgtacgaaccacaccaaagaaagaacatcttttactctaactgtggtattgttgctatgggctctattttgacctatttgtccatggttttctctccattaactgttttcatgtactacggtatcccatacttgggtgttaatgcttggattgtttgcattacttacttacaacacactgatccaaaggttcctcacttcagagacaacgaatggaattttcaaagaggtgccgcttgtaccatcgatagatccttcggtactattgtcaaccacttgcaccaccacatcggcgattcccaccaatgtcaccacatgttctctcaaatgccattctacaatgctgtcgaagctactaagtatctaaaggccaagctaggtaagtactacatcttcgacgacactccaattgccaaggctttgtacagaaactggagagaatgtaaattcgtcgaagacgaaggtgatgttgttttctacaagcactaa

SEQ ID NO: 532 - DNA, 1212 bp, Artificial sequence
  Delta-15 Desaturase
atggcccctccacacgtcgtcgacgaacaagttagaagaagaatcgttgttgaagacgagattaagtcaaagaaacaattcgagagaaactacgtcccaatggatttcactatcaaggaaatcagagacgctatccctgctcacttattcatcagagacacaactaagtcaattctacacgttgtcaaagatttggttaccattgccattgttttctactgtgctaccttcatcgaaactttgccatccttggctttgagagttccagcatggatcacctactggattattcaaggtaccgtcatggttggtccatggattttggctcacgaatgtggtcacggtgccttttctaagcacaagaggatcaactccattttgggttgggtcttgcattccgctttgttggttccttatcaggcatgggcaatgtcacactctaagcaccacaagtctactggtaatatggcgaaggatatggtcttcattccagctactcgttcctacaaaggtctacctgccctagaaaagcctgctgttgaagaagaagtttctgaacaagaacatcaccaccatgaagaatccatctttgctgaaaccccaatctacactttgggtgccttgttgttcgttttaaccttcggttggccattgtacctaattgttaacttctctggtcacgaagccccacactgggtcaaccacttccaaactgttgctccattgtacgaaccacaccaaagaaagaacatcttttactctaactgtggtattgttgctatgggctctattttgacctatttgtccatggttttctctccattaactgttttcatgtactacggtatcccatacttgggtgttaatgcttggattgtttgcattacttacttacaacacactgatccaaaggttcctcacttcagagacaacgaatggaattttcaaagaggtgccgcttgtaccatcgatagatccttcggtactattgtcaaccacttgcaccaccacatcggcgattcccaccaatgtcaccacatgttctctcaaatgccattctacaatgctgtcgaagctactaagtatctaaaggccaagctaggtaagtactacatcttcgacgacactccaattgccaaggctttgtacagaaactggagagaatgtaaattcgtcgaagacgaaggtgatgttgttttctacaagcactaa

SEQ ID NO: 533 - DNA, 1212 bp, Artificial sequence
  Delta-15 Desaturase
atggcccctccacacgtcgtcgacgaacaagttagaagaagaatcgttgttgaagacgagattaagtcaaagaaacaattcgagagaaactacgtcccaatggatttcactatcaaggaaatcagagacgctatccctgctcacttattcatcagagacacaactaagtcaattctacacgttgtcaaagatttggttaccattgccattgttttctactgtgctaccttcatcgaaactttgccatccttggctttgagagttccagcatggatcacctactggattattcaaggtaccgtcatggttggtccatggattttggctcacgaatgtggtcacggtgccttttctaagtacaagaggttcaactccattttgggttgggtcttgcattccgctttgttggttccttatcaggcatgggcaatgtcacactctaagcaccacaagtctactggtcatatggcgaaggatttcgtcttcattccagctactcgttcctacaaaggtctacctgccctagaaaagcctgctgttgaagaagaagtttctgaacaagaacatcaccaccatgaagaatccatctttgctgaaaccccaatctacactttgggtgccttgttgttcgttttaaccttcggttggccattgtacctaattgttaacttctctggtcacgaagccccacactgggtcaaccacttccaaactgttgctccattgtacgaaccacaccaaagaaagaacatcttttactctaactgtggtattgttgctatgggctctattttgacctatttgtccatggttttctctccattaactgttttcatgtactacggtatcccatacttgggtgttaatgcttggattgtttgcattacttacttacaacacactgatccaaaggttcctcacttcagagacaacgaatggaattttcaaagaggtgccgcttgtaccatcgatagatccttcggtactattgtcaaccacttgcaccaccacatcggcgattcccaccaatgtcaccacatgttctctcaaatgccattctacaatgctgtcgaagctactaagtatctaaaggccaagctaggtaagtactacatcttcgacgacactccaattgccaaggctttgtacagaaactggagagaatgtaaattcgtcgaagacgaaggtgatgttgttttctacaagcactaa

SEQ ID NO: 534 - DNA, 1212 bp, Artificial sequence
  Delta-15 Desaturase
atggcccctccacacgtcgtcgacgaacaagttagaagaagaatcgttgttgaagacgagattaagtcaaagaaacaattcgagagaaactacgtcccaatggatttcactatcaaggaaatcagagacgctatccctgctcacttattcatcagagacacaactaagtcaattctacacgttgtcaaagatttggttaccattgccattgttttctactgtgctaccttcatcgaaactttgccatccttggctttgagagttccagcatggatcacctactggattattcaaggtaccgtcatggttggtccatggattttggctcacgaatgtggtcacggtgccttttctgagcacaggacgatcaacaacattatcggttgggtcttgcattccgctttgttggttccttatcaggcatgggcaatgtcacactctaagcaccacaagggtactggttccatgactaaggatgttgtcttcattccagctactcgttcctacaaaggtctacctgccctagaaaagcctgctgttgaagaagaagtttctgaacaagaacatcaccaccatgaagaatccatctttgctgaaaccccaatctacactttgggtgccttgttgttcgttttaaccttcggttggccattgtacctaattgttaacttctctggtcacgaagccccacactgggtcaaccacttccaaactgttgctccattgtacgaaccacaccaaagaaagaacatcttttactctaactgtggtattgttgctatgggctctattttgacctatttgtccatggttttctctccattaactgttttcatgtactacggtatcccatacttgggtgttaatgcttggattgtttgcattacttacttacaacacactgatccaaaggttcctcacttcagagacaacgaatggaattttcaaagaggtgccgcttgtaccatcgatagatccttcggtactattgtcaaccacttgcaccaccacatcggcgattcccaccaatgtcaccacatgttctctcaaatgccattctacaatgctgtcgaagctactaagtatctaaaggccaagctaggtaagtactacatcttcgacgacactccaattgccaaggctttgtacagaaactggagagaatgtaaattcgtcgaagacgaaggtgatgttgttttctacaagcactaa

SEQ ID NO: 535 - DNA, 1212 bp, Artificial sequence
  Delta-15 Desaturase
atggcccctccacacgtcgtcgacgaacaagttagaagaagaatcgttgttgaagacgagattaagtcaaagaaacaattcgagagaaactacgtcccaatggatttcactatcaaggaaatcagagacgctatccctgctcacttattcatcagagacacaactaagtcaattctacacgttgtcaaagatttggttaccattgccattgttttctactgtgctaccttcatcgaaactttgccatccttggctttgagagttccagcatggatcacctactggattattcaaggtaccgtcatggttggtccatggattttggctcacgaatgtggtcacggtgccttttctaagcacacgacgatcaactacattttcggttgggtcttgcattccgctttgttggttccttatcaggcatgggcaatgtcacactctaagcaccacaagtatactggttccatgactaaggatgttgtcttcattccagctactcgttcctacaaaggtctacctgccctagaaaagcctgctgttgaagaagaagtttctgaacaagaacatcaccaccatgaagaatccatctttgctgaaaccccaatctacactttgggtgccttgttgttcgttttaaccttcggttggccattgtacctaattgttaacttctctggtcacgaagccccacactgggtcaaccacttccaaactgttgctccattgtacgaaccacaccaaagaaagaacatcttttactctaactgtggtattgttgctatgggctctattttgacctatttgtccatggttttctctccattaactgttttcatgtactacggtatcccatacttgggtgttaatgcttggattgtttgcattacttacttacaacacactgatccaaaggttcctcacttcagagacaacgaatggaattttcaaagaggtgccgcttgtaccatcgatagatccttcggtactattgtcaaccacttgcaccaccacatcggcgattcccaccaatgtcaccacatgttctctcaaatgccattctacaatgctgtcgaagctactaagtatctaaaggccaagctaggtaagtactacatcttcgacgacactccaattgccaaggctttgtacagaaactggagagaatgtaaattcgtcgaagacgaaggtgatgttgttttctacaagcactaa

SEQ ID NO: 536 - DNA, 1212 bp, Artificial sequence
  Delta-15 Desaturase
atggcccctccacacgtcgtcgacgaacaagttagaagaagaatcgttgttgaagacgagattaagtcaaagaaacaattcgagagaaactacgtcccaatggatttcactatcaaggaaatcagagacgctatccctgctcacttattcatcagagacacaactaagtcaattctacacgttgtcaaagatttggttaccattgccattgttttctactgtgctaccttcatcgaaactttgccatccttggctttgagagttccagcatggatcacctactggattattcaaggtaccgtcatggttggtccatggattttggctcacgaatgtggtcacggtgccttttctaaacccaagaggatcaactccattttcggttgggtcttgcattccgctttgttggttccttatcaggcatgggcaatgtcacactctaagcaccacaagggtactggttccatgactaaggatgttgtcttcattccagctactcgttcctacaaaggtctacctgccctagaaaagcctgctgttgaagaagaagtttctgaacaagaacatcaccaccatgaagaatccatctttgctgaaaccccaatctacactttgggtgccttgttgttcgttttaaccttcggttggccattgtacctaattgttaacttctctggtcacgaagccccacactgggtcaaccacttccaaactgttgctccattgtacgaaccacaccaaagaaagaacatcttttactctaactgtggtattgttgctatgggctctattttgacctatttgtccatggttttctctccattaactgttttcatgtactacggtatcccatacttgggtgttaatgcttggattgtttgcattacttacttacaacacactgatccaaaggttcctcacttcagagacaacgaatggaattttcaaagaggtgccgcttgtaccatcgatagatccttcggtactattgtcaaccacttgcaccaccacatcggcgattcccaccaatgtcaccacatgttctctcaaatgccattctacaatgctgtcgaagctactaagtatctaaaggccaagctaggtaagtactacatcttcgacgacactccaattgccaaggctttgtacagaaactggagagaatgtaaattcgtcgaagacgaaggtgatgttgttttctacaagcactaa

SEQ ID NO: 537 - DNA, 1212 bp, Artificial sequence
  Delta-15 Desaturase
atggcccctccacacgtcgtcgacgaacaagttagaagaagaatcgttgttgaagacgagattaagtcaaagaaacaattcgagagaaactacgtcccaatggatttcactatcaaggaaatcagagacgctatccctgctcacttattcatcagagacacaactaagtcaattctacacgttgtcaaagatttggttaccattgccattgttttctactgtgctaccttcatcgaaactttgccatccttggctttgagagttccagcatggatcacctactggattattcaaggtaccgtcatggttggtccatggattttggctcacgaatgtggtcacggtgccttttctgaatacaagaggatcaacaacattttcggttgggtcttgcattccgctttgttggttccttatcaggcatgggcaatgtcacactctaagcaccacaagtatactggtcatatgacgaaggatatcgtcttcattccagctactcgttcctacaaaggtctacctgccctagaaaagcctgctgttgaagaagaagtttctgaacaagaacatcaccaccatgaagaatccatctttgctgaaaccccaatctacactttgggtgccttgttgttcgttttaaccttcggttggccattgtacctaattgttaacttctctggtcacgaagccccacactgggtcaaccacttccaaactgttgctccattgtacgaaccacaccaaagaaagaacatcttttactctaactgtggtattgttgctatgggctctattttgacctatttgtccatggttttctctccattaactgttttcatgtactacggtatcccatacttgggtgttaatgcttggattgtttgcattacttacttacaacacactgatccaaaggttcctcacttcagagacaacgaatggaattttcaaagaggtgccgcttgtaccatcgatagatccttcggtactattgtcaaccacttgcaccaccacatcggcgattcccaccaatgtcaccacatgttctctcaaatgccattctacaatgctgtcgaagctactaagtatctaaaggccaagctaggtaagtactacatcttcgacgacactccaattgccaaggctttgtacagaaactggagagaatgtaaattcgtcgaagacgaaggtgatgttgttttctacaagcactaa

SEQ ID NO: 538 - DNA, 1212 bp, Artificial sequence
  Delta-15 Desaturase
atggcccctccacacgtcgtcgacgaacaagttagaagaagaatcgttgttgaagacgagattaagtcaaagaaacaattcgagagaaactacgtcccaatggatttcactatcaaggaaatcagagacgctatccctgctcacttattcatcagagacacaactaagtcaattctacacgttgtcaaagatttggttaccattgccattgttttctactgtgctaccttcatcgaaactttgccatccttggctttgagagttccagcatggatcacctactggattattcaaggtaccgtcatggttggtccatggattttggctcacgaatgtggtcacggtgccttttctaaatacaggtcgttcaactccattatgggttgggtcttgcattccgctttgttggttccttatcaggcatgggcaatgtcacactctaagcaccacaagtgtactggtgatatgaagaaggatctcgtcttcattccagctactcgttcctacaaaggtctacctgccctagaaaagcctgctgttgaagaagaagtttctgaacaagaacatcaccaccatgaagaatccatctttgctgaaaccccaatctacactttgggtgccttgttgttcgttttaaccttcggttggccattgtacctaattgttaacttctctggtcacgaagccccacactgggtcaaccacttccaaactgttgctccattgtacgaaccacaccaaagaaagaacatcttttactctaactgtggtattgttgctatgggctctattttgacctatttgtccatggttttctctccattaactgttttcatgtactacggtatcccatacttgggtgttaatgcttggattgtttgcattacttacttacaacacactgatccaaaggttcctcacttcagagacaacgaatggaattttcaaagaggtgccgcttgtaccatcgatagatccttcggtactattgtcaaccacttgcaccaccacatcggcgattcccaccaatgtcaccacatgttctctcaaatgccattctacaatgctgtcgaagctactaagtatctaaaggccaagctaggtaagtactacatcttcgacgacactccaattgccaaggctttgtacagaaactggagagaatgtaaattcgtcgaagacgaaggtgatgttgttttctacaagcactaa

SEQ ID NO: 539 - DNA, 1212 bp, Artificial sequence
  Delta-15 Desaturase
atggcccctccacacgtcgtcgacgaacaagttagaagaagaatcgttgttgaagacgagattaagtcaaagaaacaattcgagagaaactacgtcccaatggatttcactatcaaggaaatcagagacgctatccctgctcacttattcatcagagacacaactaagtcaattctacacgttgtcaaagatttggttaccattgccattgttttctactgtgctaccttcatcgaaactttgccatccttggctttgagagttccagcatggatcacctactggattattcaaggtaccgtcatggttggtccatggattttggctcacgaatgtggtcacggtgccttttctaagcccaagtcgttcaactacattttcggttgggtcttgcattccgctttgttggttccttatcaggcatgggcaatgtcacactctaagcaccacaagggtactggttccatgactaaggatgttgtcttcattccagctactcgttcctacaaaggtctacctgccctagaaaagcctgctgttgaagaagaagtttctgaacaagaacatcaccaccatgaagaatccatctttgctgaaaccccaatctacactttgggtgccttgttgttcgttttaaccttcggttggccattgtacctaattgttaacttctctggtcacgaagccccacactgggtcaaccacttccaaactgttgctccattgtacgaaccacaccaaagaaagaacatcttttactctaactgtggtattgttgctatgggctctattttgacctatttgtccatggttttctctccattaactgttttcatgtactacggtatcccatacttgggtgttaatgcttggattgtttgcattacttacttacaacacactgatccaaaggttcctcacttcagagacaacgaatggaattttcaaagaggtgccgcttgtaccatcgatagatccttcggtactattgtcaaccacttgcaccaccacatcggcgattcccaccaatgtcaccacatgttctctcaaatgccattctacaatgctgtcgaagctactaagtatctaaaggccaagctaggtaagtactacatcttcgacgacactccaattgccaaggctttgtacagaaactggagagaatgtaaattcgtcgaagacgaaggtgatgttgttttctacaagcactaa

SEQ ID NO: 540 - DNA, 1212 bp, Artificial sequence
  Delta-15 Desaturase
atggcccctccacacgtcgtcgacgaacaagttagaagaagaatcgttgttgaagacgagattaagtcaaagaaacaattcgagagaaactacgtcccaatggatttcactatcaaggaaatcagagacgctatccctgctcacttattcatcagagacacaactaagtcaattctacacgttgtcaaagatttggttaccattgccattgttttctactgtgctaccttcatcgaaactttgccatccttggctttgagagttccagcatggatcacctactggattattcaaggtaccgtcatggttggtccatggattttggctcacgaatgtggtcacggtgccttttctaaacccagggcgttcaactccattatgggttgggtcttgcattccgctttgttggttccttatcaggcatgggcaatgtcacactctaagcaccacaagggtactggttccatgactaaggatgttgtcttcattccagctactcgttcctacaaaggtctacctgccctagaaaagcctgctgttgaagaagaagtttctgaacaagaacatcaccaccatgaagaatccatctttgctgaaaccccaatctacactttgggtgccttgttgttcgttttaaccttcggttggccattgtacctaattgttaacttctctggtcacgaagccccacactgggtcaaccacttccaaactgttgctccattgtacgaaccacaccaaagaaagaacatcttttactctaactgtggtattgttgctatgggctctattttgacctatttgtccatggttttctctccattaactgttttcatgtactacggtatcccatacttgggtgttaatgcttggattgtttgcattacttacttacaacacactgatccaaaggttcctcacttcagagacaacgaatggaattttcaaagaggtgccgcttgtaccatcgatagatccttcggtactattgtcaaccacttgcaccaccacatcggcgattcccaccaatgtcaccacatgttctctcaaatgccattctacaatgctgtcgaagctactaagtatctaaaggccaagctaggtaagtactacatcttcgacgacactccaattgccaaggctttgtacagaaactggagagaatgtaaattcgtcgaagacgaaggtgatgttgttttctacaagcactaa

SEQ ID NO: 541 - DNA, 1212 bp, Artificial sequence
  Delta-15 Desaturase
atggcccctccacacgtcgtcgacgaacaagttagaagaagaatcgttgttgaagacgagattaagtcaaagaaacaattcgagagaaactacgtcccaatggatttcactatcaaggaaatcagagacgctatccctgctcacttattcatcagagacacaactaagtcaattctacacgttgtcaaagatttggttaccattgccattgttttctactgtgctaccttcatcgaaactttgccatccttggctttgagagttccagcatggatcacctactggattattcaaggtaccgtcatggttggtccatggattttggctcacgaatgtggtcacggtgccttttctaaacccacgaggttcaactacattttcggttgggtcttgcattccgctttgttggttccttatcaggcatgggcaatgtcacactctaagcaccacaagggtactggttccatgactaaggatgttgtcttcattccagctactcgttcctacaaaggtctacctgccctagaaaagcctgctgttgaagaagaagtttctgaacaagaacatcaccaccatgaagaatccatctttgctgaaaccccaatctacactttgggtgccttgttgttcgttttaaccttcggttggccattgtacctaattgttaacttctctggtcacgaagccccacactgggtcaaccacttccaaactgttgctccattgtacgaaccacaccaaagaaagaacatcttttactctaactgtggtattgttgctatgggctctattttgacctatttgtccatggttttctctccattaactgttttcatgtactacggtatcccatacttgggtgttaatgcttggattgtttgcattacttacttacaacacactgatccaaaggttcctcacttcagagacaacgaatggaattttcaaagaggtgccgcttgtaccatcgatagatccttcggtactattgtcaaccacttgcaccaccacatcggcgattcccaccaatgtcaccacatgttctctcaaatgccattctacaatgctgtcgaagctactaagtatctaaaggccaagctaggtaagtactacatcttcgacgacactccaattgccaaggctttgtacagaaactggagagaatgtaaattcgtcgaagacgaaggtgatgttgttttctacaagcactaa

SEQ ID NO: 542 - DNA, 1212 bp, Artificial sequence
  Delta-15 Desaturase
atggcccctccacacgtcgtcgacgaacaagttagaagaagaatcgttgttgaagacgagattaagtcaaagaaacaattcgagagaaactacgtcccaatggatttcactatcaaggaaatcagagacgctatccctgctcacttattcatcagagacacaactaagtcaattctacacgttgtcaaagatttggttaccattgccattgttttctactgtgctaccttcatcgaaactttgccatccttggctttgagagttccagcatggatcacctactggattattcaaggtaccgtcatggttggtccatggattttggctcacgaatgtggtcacggtgccttttctaaacccacgtggttcaacaccattatgggttgggtcttgcattccgctttgttggttccttatcaggcatgggcaatgtcacactctaagcaccacaagggtactggttccatgactaaggatgttgtcttcattccagctactcgttcctacaaaggtctacctgccctagaaaagcctgctgttgaagaagaagtttctgaacaagaacatcaccaccatgaagaatccatctttgctgaaaccccaatctacactttgggtgccttgttgttcgttttaaccttcggttggccattgtacctaattgttaacttctctggtcacgaagccccacactgggtcaaccacttccaaactgttgctccattgtacgaaccacaccaaagaaagaacatcttttactctaactgtggtattgttgctatgggctctattttgacctatttgtccatggttttctctccattaactgttttcatgtactacggtatcccatacttgggtgttaatgcttggattgtttgcattacttacttacaacacactgatccaaaggttcctcacttcagagacaacgaatggaattttcaaagaggtgccgcttgtaccatcgatagatccttcggtactattgtcaaccacttgcaccaccacatcggcgattcccaccaatgtcaccacatgttctctcaaatgccattctacaatgctgtcgaagctactaagtatctaaaggccaagctaggtaagtactacatcttcgacgacactccaattgccaaggctttgtacagaaactggagagaatgtaaattcgtcgaagacgaaggtgatgttgttttctacaagcactaa

SEQ ID NO: 543 - DNA, 1212 bp, Artificial sequence
  Delta-15 Desaturase
atggcccctccacacgtcgtcgacgaacaagttagaagaagaatcgttgttgaagacgagattaagtcaaagaaacaattcgagagaaactacgtcccaatggatttcactatcaaggaaatcagagacgctatccctgctcacttattcatcagagacacaactaagtcaattctacacgttgtcaaagatttggttaccattgccattgttttctactgtgctaccttcatcgaaactttgccatccttggctttgagagttccagcatggatcacctactggattattcaaggtaccgtcatggttggtccatggattttggctcacgaatgtggtcacggtgccttttctaaccacaagaggatcaacaacattatcggttgggtcttgcattccgctttgttggttccttatcaggcatgggcaatgtcacactctaagcaccacaagggtactggttccatgactaaggatgttgtcttcattccagctactcgttcctacaaaggtctacctgccctagaaaagcctgctgttgaagaagaagtttctgaacaagaacatcaccaccatgaagaatccatctttgctgaaaccccaatctacactttgggtgccttgttgttcgttttaaccttcggttggccattgtacctaattgttaacttctctggtcacgaagccccacactgggtcaaccacttccaaactgttgctccattgtacgaaccacaccaaagaaagaacatcttttactctaactgtggtattgttgctatgggctctattttgacctatttgtccatggttttctctccattaactgttttcatgtactacggtatcccatacttgggtgttaatgcttggattgtttgcattacttacttacaacacactgatccaaaggttcctcacttcagagacaacgaatggaattttcaaagaggtgccgcttgtaccatcgatagatccttcggtactattgtcaaccacttgcaccaccacatcggcgattcccaccaatgtcaccacatgttctctcaaatgccattctacaatgctgtcgaagctactaagtatctaaaggccaagctaggtaagtactacatcttcgacgacactccaattgccaaggctttgtacagaaactggagagaatgtaaattcgtcgaagacgaaggtgatgttgttttctacaagcactaa

SEQ ID NO: 544 - DNA, 1212 bp, Artificial sequence
  Delta-15 Desaturase
atggcccctccacacgtcgtcgacgaacaagttagaagaagaatcgttgttgaagacgagattaagtcaaagaaacaattcgagagaaactacgtcccaatggatttcactatcaaggaaatcagagacgctatccctgctcacttattcatcagagacacaactaagtcaattctacacgttgtcaaagatttggttaccattgccattgttttctactgtgctaccttcatcgaaactttgccatccttggctttgagagttccagcatggatcacctactggattattcaaggtaccgtcatggttggtccatggattttggctcacgaatgtggtcacggtgccttttctaaatacaagtggttcaactacattatgggttgggtcttgcattccgctttgttggttccttatcaggcatgggcaatgtcacactctaagcaccacaaggctactggtcatatgtcgaaggatttggtcttcattccagctactcgttcctacaaaggtctacctgccctagaaaagcctgctgttgaagaagaagtttctgaacaagaacatcaccaccatgaagaatccatctttgctgaaaccccaatctacactttgggtgccttgttgttcgttttaaccttcggttggccattgtacctaattgttaacttctctggtcacgaagccccacactgggtcaaccacttccaaactgttgctccattgtacgaaccacaccaaagaaagaacatcttttactctaactgtggtattgttgctatgggctctattttgacctatttgtccatggttttctctccattaactgttttcatgtactacggtatcccatacttgggtgttaatgcttggattgtttgcattacttacttacaacacactgatccaaaggttcctcacttcagagacaacgaatggaattttcaaagaggtgccgcttgtaccatcgatagatccttcggtactattgtcaaccacttgcaccaccacatcggcgattcccaccaatgtcaccacatgttctctcaaatgccattctacaatgctgtcgaagctactaagtatctaaaggccaagctaggtaagtactacatcttcgacgacactccaattgccaaggctttgtacagaaactggagagaatgtaaattcgtcgaagacgaaggtgatgttgttttctacaagcactaa

SEQ ID NO: 545 - DNA, 1212 bp, Artificial sequence
  Delta-15 Desaturase
atggcccctccacacgtcgtcgacgaacaagttagaagaagaatcgttgttgaagacgagattaagtcaaagaaacaattcgagagaaactacgtcccaatggatttcactatcaaggaaatcagagacgctatccctgctcacttattcatcagagacacaactaagtcaattctacacgttgtcaaagatttggttaccattgccattgttttctactgtgctaccttcatcgaaactttgccatccttggctttgagagttccagcatggatcacctactggattattcaaggtaccgtcatggttggtccatggattttggctcacgaatgtggtcacggtgccttttctgaatacacgtggttcaactccattttgggttgggtcttgcattccgctttgttggttccttatcaggcatgggcaatgtcacactctaagcaccacaagtatactggtcatatgtcgaaggatctcgtcttcattccagctactcgttcctacaaaggtctacctgccctagaaaagcctgctgttgaagaagaagtttctgaacaagaacatcaccaccatgaagaatccatctttgctgaaaccccaatctacactttgggtgccttgttgttcgttttaaccttcggttggccattgtacctaattgttaacttctctggtcacgaagccccacactgggtcaaccacttccaaactgttgctccattgtacgaaccacaccaaagaaagaacatcttttactctaactgtggtattgttgctatgggctctattttgacctatttgtccatggttttctctccattaactgttttcatgtactacggtatcccatacttgggtgttaatgcttggattgtttgcattacttacttacaacacactgatccaaaggttcctcacttcagagacaacgaatggaattttcaaagaggtgccgcttgtaccatcgatagatccttcggtactattgtcaaccacttgcaccaccacatcggcgattcccaccaatgtcaccacatgttctctcaaatgccattctacaatgctgtcgaagctactaagtatctaaaggccaagctaggtaagtactacatcttcgacgacactccaattgccaaggctttgtacagaaactggagagaatgtaaattcgtcgaagacgaaggtgatgttgttttctacaagcactaa

SEQ ID NO: 546 - DNA, 1212 bp, Artificial sequence
  Delta-15 Desaturase
atggcccctccacacgtcgtcgacgaacaagttagaagaagaatcgttgttgaagacgagattaagtcaaagaaacaattcgagagaaactacgtcccaatggatttcactatcaaggaaatcagagacgctatccctgctcacttattcatcagagacacaactaagtcaattctacacgttgtcaaagatttggttaccattgccattgttttctactgtgctaccttcatcgaaactttgccatccttggctttgagagttccagcatggatcacctactggattattcaaggtaccgtcatggttggtccatggattttggctcacgaatgtggtcacggtgccttttctaagtccaagaggatcaacaccattttgggttgggtcttgcattccgctttgttggttccttatcaggcatgggcaatgtcacactctaagcaccacaagtatactggtcgtatgtcgaaggatgtggtcttcattccagctactcgttcctacaaaggtctacctgccctagaaaagcctgctgttgaagaagaagtttctgaacaagaacatcaccaccatgaagaatccatctttgctgaaaccccaatctacactttgggtgccttgttgttcgttttaaccttcggttggccattgtacctaattgttaacttctctggtcacgaagccccacactgggtcaaccacttccaaactgttgctccattgtacgaaccacaccaaagaaagaacatcttttactctaactgtggtattgttgctatgggctctattttgacctatttgtccatggttttctctccattaactgttttcatgtactacggtatcccatacttgggtgttaatgcttggattgtttgcattacttacttacaacacactgatccaaaggttcctcacttcagagacaacgaatggaattttcaaagaggtgccgcttgtaccatcgatagatccttcggtactattgtcaaccacttgcaccaccacatcggcgattcccaccaatgtcaccacatgttctctcaaatgccattctacaatgctgtcgaagctactaagtatctaaaggccaagctaggtaagtactacatcttcgacgacactccaattgccaaggctttgtacagaaactggagagaatgtaaattcgtcgaagacgaaggtgatgttgttttctacaagcactaa

SEQ ID NO: 547 - DNA, 1212 bp, Artificial sequence
  Delta-15 Desaturase
atggcccctccacacgtcgtcgacgaacaagttagaagaagaatcgttgttgaagacgagattaagtcaaagaaacaattcgagagaaactacgtcccaatggatttcactatcaaggaaatcagagacgctatccctgctcacttattcatcagagacacaactaagtcaattctacacgttgtcaaagatttggttaccattgccattgttttctactgtgctaccttcatcgaaactttgccatccttggctttgagagttccagcatggatcacctactggattattcaaggtaccgtcatggttggtccatggattttggctcacgaatgtggtcacggtgccttttctgaatccaggaggatcaacaacattttcggttgggtcttgcattccgctttgttggttccttatcaggcatgggcaatgtcacactctaagcaccacaagggtactggttccatgactaaggatgttgtcttcattccagctactcgttcctacaaaggtctacctgccctagaaaagcctgctgttgaagaagaagtttctgaacaagaacatcaccaccatgaagaatccatctttgctgaaaccccaatctacactttgggtgccttgttgttcgttttaaccttcggttggccattgtacctaattgttaacttctctggtcacgaagccccacactgggtcaaccacttccaaactgttgctccattgtacgaaccacaccaaagaaagaacatcttttactctaactgtggtattgttgctatgggctctattttgacctatttgtccatggttttctctccattaactgttttcatgtactacggtatcccatacttgggtgttaatgcttggattgtttgcattacttacttacaacacactgatccaaaggttcctcacttcagagacaacgaatggaattttcaaagaggtgccgcttgtaccatcgatagatccttcggtactattgtcaaccacttgcaccaccacatcggcgattcccaccaatgtcaccacatgttctctcaaatgccattctacaatgctgtcgaagctactaagtatctaaaggccaagctaggtaagtactacatcttcgacgacactccaattgccaaggctttgtacagaaactggagagaatgtaaattcgtcgaagacgaaggtgatgttgttttctacaagcactaa

SEQ ID NO: 548 - DNA, 1212 bp, Artificial sequence
  Delta-15 Desaturase
atggcccctccacacgtcgtcgacgaacaagttagaagaagaatcgttgttgaagacgagattaagtcaaagaaacaattcgagagaaactacgtcccaatggatttcactatcaaggaaatcagagacgctatccctgctcacttattcatcagagacacaactaagtcaattctacacgttgtcaaagatttggttaccattgccattgttttctactgtgctaccttcatcgaaactttgccatccttggctttgagagttccagcatggatcacctactggattattcaaggtaccgtcatggttggtccatggattttggctcacgaatgtggtcacggtgccttttctgaacccaagacgatcaacaccattttcggttgggtcttgcattccgctttgttggttccttatcaggcatgggcaatgtcacactctaagcaccacaagtttactggtaatatgaagaaggatgtggtcttcattccagctactcgttcctacaaaggtctacctgccctagaaaagcctgctgttgaagaagaagtttctgaacaagaacatcaccaccatgaagaatccatctttgctgaaaccccaatctacactttgggtgccttgttgttcgttttaaccttcggttggccattgtacctaattgttaacttctctggtcacgaagccccacactgggtcaaccacttccaaactgttgctccattgtacgaaccacaccaaagaaagaacatcttttactctaactgtggtattgttgctatgggctctattttgacctatttgtccatggttttctctccattaactgttttcatgtactacggtatcccatacttgggtgttaatgcttggattgtttgcattacttacttacaacacactgatccaaaggttcctcacttcagagacaacgaatggaattttcaaagaggtgccgcttgtaccatcgatagatccttcggtactattgtcaaccacttgcaccaccacatcggcgattcccaccaatgtcaccacatgttctctcaaatgccattctacaatgctgtcgaagctactaagtatctaaaggccaagctaggtaagtactacatcttcgacgacactccaattgccaaggctttgtacagaaactggagagaatgtaaattcgtcgaagacgaaggtgatgttgttttctacaagcactaa

SEQ ID NO: 549 - DNA, 1212 bp, Artificial sequence
  Delta-15 Desaturase
atggcccctccacacgtcgtcgacgaacaagttagaagaagaatcgttgttgaagacgagattaagtcaaagaaacaattcgagagaaactacgtcccaatggatttcactatcaaggaaatcagagacgctatccctgctcacttattcatcagagacacaactaagtcaattctacacgttgtcaaagatttggttaccattgccattgttttctactgtgctaccttcatcgaaactttgccatccttggctttgagagttccagcatggatcacctactggattattcaaggtaccgtcatggttggtccatggattttggctcacgaatgtggtcacggtgccttttctcagcccaggacgttcaacaccattttcggttgggtcttgcattccgctttgttggttccttatcaggcatgggcaatgtcacactctaagcaccacaagggtactggttccatgactaaggatgttgtcttcattccagctactcgttcctacaaaggtctacctgccctagaaaagcctgctgttgaagaagaagtttctgaacaagaacatcaccaccatgaagaatccatctttgctgaaaccccaatctacactttgggtgccttgttgttcgttttaaccttcggttggccattgtacctaattgttaacttctctggtcacgaagccccacactgggtcaaccacttccaaactgttgctccattgtacgaaccacaccaaagaaagaacatcttttactctaactgtggtattgttgctatgggctctattttgacctatttgtccatggttttctctccattaactgttttcatgtactacggtatcccatacttgggtgttaatgcttggattgtttgcattacttacttacaacacactgatccaaaggttcctcacttcagagacaacgaatggaattttcaaagaggtgccgcttgtaccatcgatagatccttcggtactattgtcaaccacttgcaccaccacatcggcgattcccaccaatgtcaccacatgttctctcaaatgccattctacaatgctgtcgaagctactaagtatctaaaggccaagctaggtaagtactacatcttcgacgacactccaattgccaaggctttgtacagaaactggagagaatgtaaattcgtcgaagacgaaggtgatgttgttttctacaagcactaa

SEQ ID NO: 550 - DNA, 1212 bp, Artificial sequence
  Delta-15 Desaturase
atggcccctccacacgtcgtcgacgaacaagttagaagaagaatcgttgttgaagacgagattaagtcaaagaaacaattcgagagaaactacgtcccaatggatttcactatcaaggaaatcagagacgctatccctgctcacttattcatcagagacacaactaagtcaattctacacgttgtcaaagatttggttaccattgccattgttttctactgtgctaccttcatcgaaactttgccatccttggctttgagagttccagcatggatcacctactggattattcaaggtaccgtcatggttggtccatggattttggctcacgaatgtggtcacggtgccttttctcaatccaggtcgttcaacaccattttcggttgggtcttgcattccgctttgttggttccttatcaggcatgggcaatgtcacactctaagcaccacaagggtactggttccatgactaaggatgttgtcttcattccagctactcgttcctacaaaggtctacctgccctagaaaagcctgctgttgaagaagaagtttctgaacaagaacatcaccaccatgaagaatccatctttgctgaaaccccaatctacactttgggtgccttgttgttcgttttaaccttcggttggccattgtacctaattgttaacttctctggtcacgaagccccacactgggtcaaccacttccaaactgttgctccattgtacgaaccacaccaaagaaagaacatcttttactctaactgtggtattgttgctatgggctctattttgacctatttgtccatggttttctctccattaactgttttcatgtactacggtatcccatacttgggtgttaatgcttggattgtttgcattacttacttacaacacactgatccaaaggttcctcacttcagagacaacgaatggaattttcaaagaggtgccgcttgtaccatcgatagatccttcggtactattgtcaaccacttgcaccaccacatcggcgattcccaccaatgtcaccacatgttctctcaaatgccattctacaatgctgtcgaagctactaagtatctaaaggccaagctaggtaagtactacatcttcgacgacactccaattgccaaggctttgtacagaaactggagagaatgtaaattcgtcgaagacgaaggtgatgttgttttctacaagcactaa

SEQ ID NO: 551 - DNA, 1212 bp, Artificial sequence
  Delta-15 Desaturase
atggcccctccacacgtcgtcgacgaacaagttagaagaagaatcgttgttgaagacgagattaagtcaaagaaacaattcgagagaaactacgtcccaatggatttcactatcaaggaaatcagagacgctatccctgctcacttattcatcagagacacaactaagtcaattctacacgttgtcaaagatttggttaccattgccattgttttctactgtgctaccttcatcgaaactttgccatccttggctttgagagttccagcatggatcacctactggattattcaaggtaccgtcatggttggtccatggattttggctcacgaatgtggtcacggtgccttttctaaacccacgaggttcaactacattatcggttgggtcttgcattccgctttgttggttccttatcaggcatgggcaatgtcacactctaagcaccacaagggtactggttccatgactaaggatgttgtcttcattccagctactcgttcctacaaaggtctacctgccctagaaaagcctgctgttgaagaagaagtttctgaacaagaacatcaccaccatgaagaatccatctttgctgaaaccccaatctacactttgggtgccttgttgttcgttttaaccttcggttggccattgtacctaattgttaacttctctggtcacgaagccccacactgggtcaaccacttccaaactgttgctccattgtacgaaccacaccaaagaaagaacatcttttactctaactgtggtattgttgctatgggctctattttgacctatttgtccatggttttctctccattaactgttttcatgtactacggtatcccatacttgggtgttaatgcttggattgtttgcattacttacttacaacacactgatccaaaggttcctcacttcagagacaacgaatggaattttcaaagaggtgccgcttgtaccatcgatagatccttcggtactattgtcaaccacttgcaccaccacatcggcgattcccaccaatgtcaccacatgttctctcaaatgccattctacaatgctgtcgaagctactaagtatctaaaggccaagctaggtaagtactacatcttcgacgacactccaattgccaaggctttgtacagaaactggagagaatgtaaattcgtcgaagacgaaggtgatgttgttttctacaagcactaa

SEQ ID NO: 552 - DNA, 1212 bp, Artificial sequence
  Delta-15 Desaturase
atggcccctccacacgtcgtcgacgaacaagttagaagaagaatcgttgttgaagacgagattaagtcaaagaaacaattcgagagaaactacgtcccaatggatttcactatcaaggaaatcagagacgctatccctgctcacttattcatcagagacacaactaagtcaattctacacgttgtcaaagatttggttaccattgccattgttttctactgtgctaccttcatcgaaactttgccatccttggctttgagagttccagcatggatcacctactggattattcaaggtaccgtcatggttggtccatggattttggctcacgaatgtggtcacggtgccttttctcattccacgtggttcaactccattttgggttgggtcttgcattccgctttgttggttccttatcaggcatgggcaatgtcacactctaagcaccacaagtttactggtgatatgacgaaggatgtcgtcttcattccagctactcgttcctacaaaggtctacctgccctagaaaagcctgctgttgaagaagaagtttctgaacaagaacatcaccaccatgaagaatccatctttgctgaaaccccaatctacactttgggtgccttgttgttcgttttaaccttcggttggccattgtacctaattgttaacttctctggtcacgaagccccacactgggtcaaccacttccaaactgttgctccattgtacgaaccacaccaaagaaagaacatcttttactctaactgtggtattgttgctatgggctctattttgacctatttgtccatggttttctctccattaactgttttcatgtactacggtatcccatacttgggtgttaatgcttggattgtttgcattacttacttacaacacactgatccaaaggttcctcacttcagagacaacgaatggaattttcaaagaggtgccgcttgtaccatcgatagatccttcggtactattgtcaaccacttgcaccaccacatcggcgattcccaccaatgtcaccacatgttctctcaaatgccattctacaatgctgtcgaagctactaagtatctaaaggccaagctaggtaagtactacatcttcgacgacactccaattgccaaggctttgtacagaaactggagagaatgtaaattcgtcgaagacgaaggtgatgttgttttctacaagcactaa

SEQ ID NO: 553 - DNA, 1212 bp, Artificial sequence
  Delta-15 Desaturase
atggcccctccacacgtcgtcgacgaacaagttagaagaagaatcgttgttgaagacgagattaagtcaaagaaacaattcgagagaaactacgtcccaatggatttcactatcaaggaaatcagagacgctatccctgctcacttattcatcagagacacaactaagtcaattctacacgttgtcaaagatttggttaccattgccattgttttctactgtgctaccttcatcgaaactttgccatccttggctttgagagttccagcatggatcacctactggattattcaaggtaccgtcatggttggtccatggattttggctcacgaatgtggtcacggtgccttttctgaacccaagtcgatcaactacattatgggttgggtcttgcattccgctttgttggttccttatcaggcatgggcaatgtcacactctaagcaccacaagggtactggttccatgactaaggatgttgtcttcattccagctactcgttcctacaaaggtctacctgccctagaaaagcctgctgttgaagaagaagtttctgaacaagaacatcaccaccatgaagaatccatctttgctgaaaccccaatctacactttgggtgccttgttgttcgttttaaccttcggttggccattgtacctaattgttaacttctctggtcacgaagccccacactgggtcaaccacttccaaactgttgctccattgtacgaaccacaccaaagaaagaacatcttttactctaactgtggtattgttgctatgggctctattttgacctatttgtccatggttttctctccattaactgttttcatgtactacggtatcccatacttgggtgttaatgcttggattgtttgcattacttacttacaacacactgatccaaaggttcctcacttcagagacaacgaatggaattttcaaagaggtgccgcttgtaccatcgatagatccttcggtactattgtcaaccacttgcaccaccacatcggcgattcccaccaatgtcaccacatgttctctcaaatgccattctacaatgctgtcgaagctactaagtatctaaaggccaagctaggtaagtactacatcttcgacgacactccaattgccaaggctttgtacagaaactggagagaatgtaaattcgtcgaagacgaaggtgatgttgttttctacaagcactaa

SEQ ID NO: 554 - DNA, 1212 bp, Artificial sequence
  Delta-15 Desaturase
atggcccctccacacgtcgtcgacgaacaagttagaagaagaatcgttgttgaagacgagattaagtcaaagaaacaattcgagagaaactacgtcccaatggatttcactatcaaggaaatcagagacgctatccctgctcacttattcatcagagacacaactaagtcaattctacacgttgtcaaagatttggttaccattgccattgttttctactgtgctaccttcatcgaaactttgccatccttggctttgagagttccagcatggatcacctactggattattcaaggtaccgtcatggttggtccatggattttggctcacgaatgtggtcacggtgccttttctaaacacacgacgttcaacaacattttcggttgggtcttgcattccgctttgttggttccttatcaggcatgggcaatgtcacactctaagcaccacaagggtactggttccatgactaaggatgttgtcttcattccagctactcgttcctacaaaggtctacctgccctagaaaagcctgctgttgaagaagaagtttctgaacaagaacatcaccaccatgaagaatccatctttgctgaaaccccaatctacactttgggtgccttgttgttcgttttaaccttcggttggccattgtacctaattgttaacttctctggtcacggtgccccacactgggtcaaccacttccaaactgttgctccattgtacgaaccacaccaaagaaagaacatcttttactctaactgtggtattgttgctatgggctctattttgacctatttgtccatggttttctctccattaactgttttcatgtactacggtatcccatacttgggtgttaatgcttggattgtttgcattacttacttacaacacactgatccaaaggttcctcacttcagagacaacgaatggaattttcaaagaggtgccgcttgtaccatcgatagatccttcggtactattgtcaaccacttgcaccaccacatcggcgattcccaccaatgtcaccacatgttctctcaaatgccattctacaatgctgtcgaagctactaagtatctaaaggccaagctaggtaagtactacatcttcgacgacactccaattgccaaggctttgtacagaaactggagagaatgtaaattcgtcgaagacgaaggtgatgttgttttctacaagcactaa

SEQ ID NO: 555 - DNA, 1212 bp, Artificial sequence
  Delta-15 Desaturase
atggcccctccacacgtcgtcgacgaacaagttagaagaagaatcgttgttgaagacgagattaagtcaaagaaacaattcgagagaaactacgtcccaatggatttcactatcaaggaaatcagagacgctatccctgctcacttattcatcagagacacaactaagtcaattctacacgttgtcaaagatttggttaccattgccattgttttctactgtgctaccttcatcgaaactttgccatccttggctttgagagttccagcatggatcacctactggattattcaaggtaccgtcatggttggtccatggattttggctcacgaatgtggtcacggtgccttttctaagtacaagtcgttcaacaacattttgggttgggtcttgcattccgctttgttggttccttatcaggcatgggcaatgtcacactctaagcaccacaagtatactggtgatatgtcgaaggatttggtcttcattccagctactcgttcctacaaaggtctacctgccctagaaaagcctgctgttgaagaagaagtttctgaacaagaacatcaccaccatgaagaatccatctttgctgaaaccccaatctacactttgggtgccttgttgttcgttttaaccttcggttggccattgtacctaattgttaacttctctggtcacgaagccccacactgggtcaaccacttccaaactgttgctccattgtacgaaccacaccaaagaaagaacatcttttactctaactgtggtattgttgctatgggctctattttgacctatttgtccatggttttctctccattaactgttttcatgtactacggtatcccatacttgggtgttaatgcttggattgtttgcattacttacttacaacacactgatccaaaggttcctcacttcagagacaacgaatggaattttcaaagaggtgccgcttgtaccatcgatagatccttcggtactattgtcaaccacttgcaccaccacatcggcgattcccaccaatgtcaccacatgttctctcaaatgccattctacaatgctgtcgaagctactaagtatctaaaggccaagctaggtaagtactacatcttggacgacactccaattgccaaggctttgtacagaaactggagagaatgtaaattcgtcgaagacgaaggtgatgttgttttctacaagcactaa

SEQ ID NO: 556 - DNA, 1212 bp, Artificial sequence
  Delta-15 Desaturase
atggcccctccacacgtcgtcgacgaacaagttagaagaagaatcgttgttgaagacgagattaagtcaaagaaacaattcgagagaaactacgtcccaatggatttcactatcaaggaaatcagagacgctatccctgctcacttattcatcagagacacaactaagtcaattctacacgttgtcaaagatttggttaccattgccattgttttctactgtgctaccttcatcgaaactttgccatccttggctttgagagttccagcatggatcacctactggattattcaaggtaccgtcatggttggtccatggattttggctcacgaatgtggtcacggtgccttttctaaacacaggtcgttcaactccattatcggttgggtcttgcattccgctttgttggttccttatcaggcatgggcaatgtcacactctaagcaccacaaggttactggttccatgactaaggatgttgtcttcattccagctactcgttcctacaaaggtctacctgccctagaaaagcctgctgttgaagaagaagtttctgaacaagaacatcaccaccatgaagaatccatctttgctgaaaccccaatctacactttgggtgccttgttgttcgttttaaccttcggttggccattgtacctaattgttaacttctctggtcacgaagccccacactgggtcaaccacttccaaactgttgctccattgtacgaaccacaccaaagaaagaacatcttttactctaactgtggtattgttgctatgggctctattttgacctatttgtccatggttttctctccattaactgttttcatgtactacggtatcccatacttgggtgttaatgcttggattgtttgcattacttacttacaacacactgatccaaaggttcctcacttcagagacaacgaatggaattttcaaagaggtgccgcttgtaccatcgatagatccttcggtactattgtcaaccacttgcaccaccacatcggcgattcccaccaatgtcaccacatgttctctcaaatgccattctacaatgctgtcgaagctactaagtatctaaaggccaagctaggtaagtactacatcttcgacgacactccaattgccaaggctttgtacagaaactggagagaatgtaaattcgtcgaagacgaaggtgatgttgttttctacaagcactaa

SEQ ID NO: 557 - DNA, 1212 bp, Artificial sequence
  Delta-15 Desaturase
atggcccctccacacgtcgtcgacgaacaagttagaagaagaatcgttgttgaagacgagattaagtcaaagaaacaattcgagagaaactacgtcccaatggatttcactatcaaggaaatcagagacgctatccctgctcacttattcatcagagacacaactaagtcaattctacacgttgtcaaagatttggttaccattgccattgttttctactgtgctaccttcatcgaaactttgccatccttggctttgagagttccagcatggatcacctactggattattcaaggtaccgtcatggttggtccatggattttggctcacgaatgtggtcacggtgccttttctaatcccacgtggatcaactacattttcggttgggtcttgcattccgctttgttggttccttatcaggcatgggcaatgtcacactctaagcaccacaagggtactggttccatgactaaggatgttgtcttcattccagctactcgttcctacaaaggtctacctgccctagaaaagcctgctgttgaagaagaagtttctgaacaagaacatcaccaccatgaagaatccatctttgctgaaaccccaatctacactttgggtgccttgttgttcgttttaaccttcggttggccattgtacctaattgttaacttctctggtcacgaagccccacactgggtcaaccacttccaaactgttgctccattgtacgaaccacaccaaagaaagaacatcttttactctaactgtggtattgttgctatgggctctattttgacctatttgtccatggttttctctccattaactgttttcatgtactacggtatcccatacttgggtgttaatgcttggattgtttgcattacttacttacaacacactgatccaaaggttcctcacttcagagacaacgaatggaattttcaaagaggtgccgcttgtaccatcgatagatccttcggtactattgtcaaccacttgcaccaccacatcggcgattcccaccaatgtcaccacatgttctctcaaatgccattctacaatgctgtcgaagctactaagtatctaaaggccaagctaggtaagtactacatcttcgacgacactccaattgccaaggctttgtacagaaactggagagaatgtaaattcgtggaagacgaaggtgatgttgttttctacaagcactaa

SEQ ID NO: 558 - DNA, 1212 bp, Artificial sequence
  Delta-15 Desaturase
atggcccctccacacgtcgtcgacgaacaagttagaagaagaatcgttgttgaagacgagattaagtcaaagaaacaattcgagagaaactacgtcccaatggatttcactatcaaggaaatcagagacgctatccctgctcacttattcatcagagacacaactaagtcaattctacacgttgtcaaagatttggttaccattgccattgttttctactgtgctaccttcatcgaaactttgccatccttggctttgagagttccagcatggatcacctactggattattcaaggtaccgtcatggttggtccatggattttggctcacgaatgtggtcacggtgccttttctcaacccacgtggatcaactacattatgggttgggtcttgcattccgctttgttggttccttatcaggcatgggcaatgtcacactctaagcaccacaagggtactggttccatgactaaggatgttgtcttcattccagctactcgttcctacaaaggtctacctgccctagaaaagcctgctgttgaagaagaagtttctgaacaagaacatcaccaccatgaagaatccatctttgctgaaaccccaatctacactttgggtgccttgttgttcgttttaaccttcggttggccattgtacctaattgttaacttctctggtcacgaagccccacactgggtcaaccacttccaaactgttgctccattgtacgaaccacaccaaagaaagaacatcttttactctaactgtggtattgttgctatgggctctattttgacctatttgtccatggttttctctccattaactgttttcatgtactacggtatcccatacttgggtgttaatgcttggattgtttgcattacttacttacaacacactgatccaaaggttcctcacttcagagacaacgaatggaattttcaaagaggtgccgcttgtaccatcgatagatccttcggtactattgtcaaccacttgcaccaccacatcggcgattcccaccaatgtcaccacatgttctctcaaatgccattctacaatgctgtcgaagctactaagtatctaaaggccaagctaggtaagtactacatcttcgacgacactccaattgccaaggctttgtacagaaactggagagaatgtaaattcgtcgaagacgaaggtgatgttgttttctacaagcactaa

SEQ ID NO: 559 - DNA, 1212 bp, Artificial sequence
  Delta-15 Desaturase
atggcccctccacacgtcgtcgacgaacaagttagaagaagaatcgttgttgaagacgagattaagtcaaagaaacaattcgagagaaactacgtcccaatggatttcactatcaaggaaatcagagacgctatccctgctcacttattcatcagagacacaactaagtcaattctacacgttgtcaaagatttggttaccattgccattgttttctactgtgctaccttcatcgaaactttgccatccttggctttgagagttccagcatggatcacctactggattattcaaggtaccgtcatggttggtccatggattttggctcacgaatgtggtcacggtgccttttctgaatccaagaggttcaactacattatgggttgggtcttgcattccgctttgttggttccttatcaggcatgggcaatgtcacactctaagcaccacaagggtactggttccatgactaaggatgttgtcttcattccagctactcgttcctacaaaggtctacctgccctagaaaagcctgctgttgaagaagaagtttctgaacaagaacatcaccaccatgaagaatccatctttgctgaaaccccaatctacactttgggtgccttgttgttcgttttaaccttcggttggccattgtacctaattgttaacttctctggtcacgaagccccacactgggtcaaccacttccaaactgttgctccattgtacgaaccacaccaaagaaagaacatcttttactctaactgtggtattgttgctatgggctctattttgacctatttgtccatggttttctctccattaactgttttcatgtactacggtatcccatacttgggtgttaatgcttggattgtttgcattacttacttacaacacactgatccaaaggttcctcacttcagagacaacgaatggaattttcaaagaggtgccgcttgtaccatcgatagatccttcggtactattgtcaaccacttgcaccaccacatcggcgattcccaccaatgtcaccacatgttctctcaaatgccattctacaatgctgtcgaagctactaagtatctaaaggccaagctaggtaagtactacatcttcgacgacactccaattgccaaggctttgtacagaaactggagagaatgtaaattcgtcgaagacgaaggtgatgttgttttctacaagcactaa

SEQ ID NO: 560 - DNA, 1212 bp, Artificial sequence
  Delta-15 Desaturase
atggcccctccacacgtcgtcgacgaacaagttagaagaagaatcgttgttgaagacgagattaagtcaaagaaacaattcgagagaaactacgtcccaatggatttcactatcaaggaaatcagagacgctatccctgctcacttattcatcagagacacaactaagtcaattctacacgttgtcaaagatttggttaccattgccattgttttctactgtgctaccttcatcgaaactttgccatccttggctttgagagttccagcatggatcacctactggattattcaaggtaccgtcatggttggtccatggattttggctcacgaatgtggtcacggtgccttttctcaccccaagacgatcaactccattatgggttgggtcttgcattccgctttgttggttccttatcaggcatgggcaatgtcacactctaagcaccacaagggtactggttccatgactaaggatgttgtcttcattccagctactcgttcctacaaaggtctacctgccctagaaaagcctgctgttgaagaagaagtttctgaacaagaacatcaccaccatgaagaatccatctttgctgaaaccccaatctacactttgggtgccttgttgttcgttttaaccttcggttggccattgtacctaattgttaacttctctggtcacgaagccccacactgggtcaaccacttccaaactgttgctccattgtacgaaccacaccaaagaaagaacatcttttactctaactgtggtattgttgctatgggctctattttgacctatttgtccatggttttctctccattaactgttttcatgtactacggtatcccatacttgggtgttaatgcttggattgtttgcattacttacttacaacacactgatccaaaggttcctcacttcagagacaacgaatggaattttcaaagaggtgccgcttgtaccatcgatagatccttcggtactattgtcaaccacttgcaccaccacatcggcgattcccaccaatgtcaccacatgttctctcaaatgccattctacaatgctgtcgaagctactaagtatctaaaggccaagctaggtaagtactacatcttcgacgacactccaattgccaaggctttgtacagaaactggagagaatgtaaattcgtcgaagacgaaggtgatgttgttttctacaagcactaa

SEQ ID NO: 561 - DNA, 1212 bp, Artificial sequence
  Delta-15 Desaturase
atggcccctccacacgtcgtcgacgaacaagttagaagaagaatcgttgttgaagacgagattaagtcaaagaaacaattcgagagaaactacgtcccaatggatttcactatcaaggaaatcagagacgctatccctgctcacttattcatcagagacacaactaagtcaattctacacgttgtcaaagatttggttaccattgccattgttttctactgtgctaccttcatcgaaactttgccatccttggctttgagagttccagcatggatcacctactggattattcaaggtaccgtcatggttggtccatggattttggctcacgaatgtggtcacggtgccttttctaagcccaggacgttcaactacattttgggttgggtcttgcattccgctttgttggttccttatcaggcatgggcaatgtcacactctaagcaccacaagggtactggttccatgactaaggatgttgtcttcattccagctactcgttcctacaaaggtctacctgccctagaaaagcctgctgttgaagaagaagtttctgaacaagaacatcaccaccatgaagaatccatctttgctgaaaccccaatctacactttgggtgccttgttgttcgttttaaccttcggttggccattgtacctaattgttaacttctctggtcacgaagccccacactgggtcaaccacttccaaactgttgctccattgtacgaaccacaccaaagaaagaacatcttttactctaactgtggtattgttgctatgggctctattttgacctatttgtccatggttttctctccattaactgttttcatgtactacggtatcccatacttgggtgttaatgcttggattgtttgcattacttacttacaacacactgatccaaaggttcctcacttcagagacaacgaatggaattttcaaagaggtgccgcttgtaccatcgatagatccttcggtactattgtcaaccacttgcaccaccacatcggcgattcccaccaatgtcaccacatgttctctcaaatgccattctacaatgctgtcgaagctactaagtatctaaaggccaagctaggtaagtactacatcttcgacgacactccaattgccaaggctttgtacagaaactggagagaatgtaaattcgtcgaagacgaaggtgatgttgttttctacaagcactaa

SEQ ID NO: 562 - DNA, 1212 bp, Artificial sequence
  Delta-15 Desaturase
atggcccctccacacgtcgtcgacgaacaagttagaagaagaatcgttgttgaagacgagattaagtcaaagaaacaattcgagagaaactacgtcccaatggatttcactatcaaggaaatcagagacgctatccctgctcacttattcatcagagacacaactaagtcaattctacacgttgtcaaagatttggttaccattgccattgttttctactgtgctaccttcatcgaaactttgccatccttggctttgagagttccagcatggatcacctactggattattcaaggtaccgtcatggttggtccatggattttggctcacgaatgtggtcacggtgccttttctgaacccacgacgttcaactacattatgggttgggtcttgcattccgctttgttggttccttatcaggcatgggcaatgtcacactctaagcaccacaagggtactggttccatgactaaggatgttgtcttcattccagctactcgttcctacaaaggtctacctgccctagaaaagcctgctgttgaagaagaagtttctgaacaagaacatcaccaccatgaagaatccatctttgctgaaaccccaatctacactttgggtgccttgttgttcgttttaaccttcggttggccattgtacctaattgttaacttctctggtcacgaagccccacactgggtcaaccacttccaaactgttgctccattgtacgaaccacaccaaagaaagaacatcttttactctaactgtggtattgttgctatgggctctattttgacctatttgtccatggttttctctccattaactgttttcatgtactacggtatcccatacttgggtgttaatgcttggattgtttgcattacttacttacaacacactgatccaaaggttcctcacttcagagacaacgaatggaattttcaaagaggtgccgcttgtaccatcgatagatccttcggtactattgtcaaccacttgcaccaccacatcggcgattcccaccaatgtcaccacatgttctctcaaatgccattctacaatgctgtcgaagctactaagtatctaaaggccaagctaggtaagtactacatcttcgacgacactccaattgccaaggctttgtacagaaactggagagaatgtaaattcgtcgaagacgaaggtgatgttgttttctacaagcactaa

SEQ ID NO: 563 - DNA, 1212 bp, Artificial sequence
  Delta-15 Desaturase
atggcccctccacacgtcgtcgacgaacaagttagaagaagaatcgttgttgaagacgagattaagtcaaagaaacaattcgagagaaactacgtcccaatggatttcactatcaaggaaatcagagacgctatccctgctcacttattcatcagagacacaactaagtcaattctacacgttgtcaaagatttggttaccattgccattgttttctactgtgctaccttcatcgaaactttgccatccttggctttgagagttccagcatggatcacctactggattattcaaggtaccgtcatggttggtccatggattttggctcacgaatgtggtcacggtgccttttctcagtacaagaggttcaacaccattttgggttgggtcttgcattccgctttgttggttccttatcaggcatgggcaatgtcacactctaagcaccacaagggtactggttccatgactaaggatgttgtcttcattccagctactcgttcctacaaaggtctacctgccctagaaaagcctgctgttgaagaagaagtttctgaacaagaacatcaccaccatgaagaatccatctttgctgaaaccccaatctacactttgggtgccttgttgttcgttttaaccttcggttggccattgtacctaattgttaacttctctggtcacgaagccccacactgggtcaaccacttccaaactgttgctccattgtacgaaccacaccaaagaaagaacatcttttactctaactgtggtattgttgctatgggctctattttgacctatttgtccatggttttctctccattaactgttttcatgtactacggtatcccatacttgggtgttaatgcttggattgtttgcattacttacttacaacacactgatccaaaggttcctcacttcagagacaacgaatggaattttcaaagaggtgccgcttgtaccatcgatagatccttcggtactattgtcaaccacttgcaccaccacatcggcgattcccaccaatgtcaccacatgttctctcaaatgccattctacaatgctgtcgaagctactaagtatctaaaggccaagctaggtaagtactacatcttcgacgacactccaattgccaaggctttgtacagaaactggagagaatgtaaattcgtcgaagacgaaggtgatgttgttttctacaagcactaa

SEQ ID NO: 564 - DNA, 1212 bp, Artificial sequence
  Delta-15 Desaturase
atggcccctccacacgtcgtcgacgaacaagttagaagaagaatcgttgttgaagacgagattaagtcaaagaaacaattcgagagaaactacgtcccaatggatttcactatcaaggaaatcagagacgctatccctgctcacttattcatcagagacacaactaagtcaattctacacgttgtcaaagatttggttaccattgccattgttttctactgtgctaccttcatcgaaactttgccatccttggctttgagagttccagcatggatcacctactggattattcaaggtaccgtcatggttggtccatggattttggctcacgaatgtggtcacggtgccttttctcaacacaggaggatcaactccattatcggttgggtcttgcattccgctttgttggttccttatcaggcatgggcaatgtcacactctaagcaccacaaggatactggttccatgactaaggatgttgtcttcattccagctactcgttcctacaaaggtctacctgccctagaaaagcctgctgttgaagaagaagtttctgaacaagaacatcaccaccatgaagaatccatctttgctgaaaccccaatctacactttgggtgccttgttgttcgttttaaccttcggttggccattgtacctaattgttaacttctctggtcacgaagccccacactgggtcaaccacttccaaactgttgctccattgtacgaaccacaccaaagaaagaacatcttttactctaactgtggtattgttgctatgggctctattttgacctatttgtccatggttttctctccattaactgttttcatgtactacggtatcccatacttgggtgttaatgcttggattgtttgcattacttacttacaacacactgatccaaaggttcctcacttcagagacaacgaatggaattttcaaagaggtgccgcttgtaccatcgatagatccttcggtactattgtcaaccacttgcaccaccacatcggcgattcccaccaatgtcaccacatgttctctcaaatgccattctacaatgctgtcgaagctactaagtatctaaaggccaagctaggtaagtactacatcttcgacgacactccaattgccaaggctttgtacagaaactggagagaatgtaaattcgtcgaagacgaaggtgatgttgttttctacaagcactaa

SEQ ID NO: 565 - DNA, 1212 bp, Artificial sequence
  Delta-15 Desaturase
atggcccctccacacgtcgtcgacgaacaagttagaagaagaatcgttgttgaagacgagattaagtcaaagaaacaattcgagagaaactacgtcccaatggatttcactatcaaggaaatcagagacgctatccctgctcacttattcatcagagacacaactaagtcaattctacacgttgtcaaagatttggttaccattgccattgttttctactgtgctaccttcatcgaaactttgccatccttggctttgagagttccagcatggatcacctactggattattcaaggtaccgtcatggttggtccatggattttggctcacgaatgtggtcacggtgccttttctcactacacgacgttcaacaacattatgggttgggtcttgcattccgctttgttggttccttatcaggcatgggcaatgtcacactctaagcaccacaaggatactggttccatgactaaggatgttgtcttcattccagctactcgttcctacaaaggtctacctgccctagaaaagcctgctgttgaagaagaagtttctgaacaagaacatcaccaccatgaagaatccatctttgctgaaaccccaatctacactttgggtgccttgttgttcgttttaaccttcggttggccattgtacctaattgttaacttctctggtcacgaagccccacactgggtcaaccacttccaaactgttgctccattgtacgaaccacaccaaagaaagaacatcttttactctaactgtggtattgttgctatgggctctattttgacctatttgtccatggttttctctccattaactgttttcatgtactacggtatcccatacttgggtgttaatgcttggattgtttgcattacttacttacaacacactgatccaaaggttcctcacttcagagacaacgaatggaattttcaaagaggtgccgcttgtaccatcgatagatccttcggtactattgtcaaccacttgcaccaccacatcggcgattcccaccaatgtcaccacatgttctctcaaatgccattctacaatgctgtcgaagctactaagtatctaaaggccaagctaggtaagtactacatcttcgacgacactccaattgccaaggctttgtacagaaactggagagaatgtaaattcgtcgaagacgaaggtgatgttgttttctacaagcactaa

SEQ ID NO: 566 - DNA, 1212 bp, Artificial sequence
  Delta-15 Desaturase
atggcccctccacacgtcgtcgacgaacaagttagaagaagaatcgttgttgaagacgagattaagtcaaagaaacaattcgagagaaactacgtcccaatggatttcactatcaaggaaatcagagacgctatccctgctcacttattcatcagagacacaactaagtcaattctacacgttgtcaaagatttggttaccattgccattgttttctactgtgctaccttcatcgaaactttgccatccttggctttgagagttccagcatggatcacctactggattattcaaggtaccgtcatggttggtccatggattttggctcacgaatgtggtcacggtgccttttctaatcacaagacgatcaactacattttgggttgggtcttgcattccgctttgttggttccttatcaggcatgggcaatgtcacactctaagcaccacaaggctactggtcatatgaagaaggatctcgtcttcattccagctactcgttcctacaaaggtctacctgccctagaaaagcctgctgttgaagaagaagtttctgaacaagaacatcaccaccatgaagaatccatctttgctgaaaccccaatctacactttgggtgccttgttgttcgttttaaccttcggttggccattgtacctaattgttaacttctctggtcacgaagccccacactgggtcaaccacttccaaactgttgctccattgtacgaaccacaccaaagaaagaacatcttttactctaactgtggtattgttgctatgggctctattttgacctatttgtccatggttttctctccattaactgttttcatgtactacggtatcccatacttgggtgttaatgcttggattgtttgcattacttacttacaacacactgatccaaaggttcctcacttcagagacaacgaatggaattttcaaagaggtgccgcttgtaccatcgatagatccttcggtactattgtcaaccacttgcaccaccacatcggcgattcccaccaatgtcaccacatgttctctcaaatgccattctacaatgctgtcgaagctactaagtatctaaaggccaagctaggtaagtactacatcttcgacgacactccaattgccaaggctttgtacagaaactggagagaatgtaaattcgtcgaagacgaaggtgatgttgttttctacaagcactaa

SEQ ID NO: 567 - DNA, 1212 bp, Artificial sequence
  Delta-15 Desaturase
atggcccctccacacgtcgtcgacgaacaagttagaagaagaatcgttgttgaagacgagattaagtcaaagaaacaattcgagagaaactacgtcccaatggatttcactatcaaggaaatcagagacgctatccctgctcacttattcatcagagacacaactaagtcaattctacacgttgtcaaagatttggttaccattgccattgttttctactgtgctaccttcatcgaaactttgccatccttggctttgagagttccagcatggatcacctactggattattcaaggtaccgtcatggttggtccatggattttggctcacgaatgtggtcacggtgccttttctaaacacaagtggttcaacaacattatgggttgggtcttgcattccgctttgttggttccttatcaggcatgggcaatgtcacactctaagcaccacaagtatactggtgctatgtcgaaggatatcgtcttcattccagctactcgttcctacaaaggtctacctgccctagaaaagcctgctgttgaagaagaagtttctgaacaagaacatcaccaccatgaagaatccatctttgctgaaaccccaatctacactttgggtgccttgttgttcgttttaaccttcggttggccattgtacctaattgttaacttctctggtcacgaagccccacactgggtcaaccacttccaaactgttgctccattgtacgaaccacaccaaagaaagaacatcttttactctaactgtggtattgttgctatgggctctattttgacctatttgtccatggttttctctccattaactgttttcatgtactacggtatcccatacttgggtgttaatgcttggattgtttgcattacttacttacaacacactgatccaaaggttcctcacttcagagacaacgaatggaattttcaaagaggtgccgcttgtaccatcgatagatccttcggtactattgtcaaccacttgcaccaccacatcggcgattcccaccaatgtcaccacatgttctctcaaatgccattctacaatgctgtcgaagctactaagtatctaaaggccaagctaggtaagtactacatcttcgacgacactccaattgccaaggctttgtacagaaactggagagaatgtaaattcgtcgaagacgaaggtgatgttgttttctacaagcactaa

SEQ ID NO: 568 - DNA, 1212 bp, Artificial sequence
  Delta-15 Desaturase
atggcccctccacacgtcgtcgacgaacaagttagaagaagaatcgttgttgaagacgagattaagtcaaagaaacaattcgagagaaactacgtcccaatggatttcactatcaaggaaatcagagacgctatccctgctcacttattcatcagagacacaactaagtcaattctacacgttgtcaaagatttggttaccattgccattgttttctactgtgctaccttcatcgaaactttgccatccttggctttgagagttccagcatggatcacctactggattattcaaggtaccgtcatggttggtccatggattttggctcacgaatgtggtcacggtgccttttctaaacacacgaggatcaacaccattatgggttgggtcttgcattccgctttgttggttccttatcaggcatgggcaatgtcacactctaagcaccacaagggtactggtactatgtcgaaggatgtggtcttcattccagctactcgttcctacaaaggtctacctgccctagaaaagcctgctgttgaagaagaagtttctgaacaagaacatcaccaccatgaagaatccatctttgctgaaaccccaatctacactttgggtgccttgttgttcgttttaaccttcggttggccattgtacctaattgttaacttctctggtcacgaagccccacactgggtcaaccacttccaaactgttgctccattgtacgaaccacaccaaagaaagaacatcttttactctaactgtggtattgttgctatgggctctattttgacctatttgtccatggttttctctccattaactgttttcatgtactacggtatcccatacttgggtgttaatgcttggattgtttgcattacttacttacaacacactgatccaaaggttcctcacttcagagacaacgaatggaattttcaaagaggtgccgcttgtaccatcgatagatccttcggtactattgtcaaccacttgcaccaccacatcggcgattcccaccaatgtcaccacatgttctctcaaatgccattctacaatgctgtcgaagctactaagtatctaaaggccaagctaggtaagtactacatcttcgacgacactccaattgccaaggctttgtacagaaactggagagaatgtaaattcgtcgaagacgaaggtgatgttgttttctacaagcactaa

SEQ ID NO: 569 - DNA, 1212 bp, Artificial sequence
  Delta-15 Desaturase
atggcccctccacacgtcgtcgacgaacaagttagaagaagaatcgttgttgaagacgagattaagtcaaagaaacaattcgagagaaactacgtcccaatggatttcactatcaaggaaatcagagacgctatccctgctcacttattcatcagagacacaactaagtcaattctacacgttgtcaaagatttggttaccattgccattgttttctactgtgctaccttcatcgaaactttgccatccttggctttgagagttccagcatggatcacctactggattattcaaggtaccgtcatggttggtccatggattttggctcacgaatgtggtcacggtgccttttctgaatacacgtggttcaactacattttcggttgggtcttgcattccgctttgttggttccttatcaggcatgggcaatgtcacactctaagcaccacaagggtactggttccatgactaaggatgttgtcttcattccagctactcgttcctacaaaggtctacctgccctagaaaagcctgctgttgaagaagaagtttctgaacaagaacatcaccaccatgaagaatccatctttgctgaaaccccaatctacactttgggtgccttgttgttcgttttaaccttcggttggccattgtacctaattgttaacttctctggtcacgaagccccacactgggtcaaccacttccaaactgttgctccattgtacgaaccacaccaaagaaagaacatcttttactctaactgtggtattgttgctatgggctctattttgacctatttgtccatggttttctctccattaactgttttcatgtactacggtatcccatacttgggtgttaatgcttggattgtttgcattacttacttacaacacactgatccaaaggttcctcacttcagagacaacgaatggaattttcaaagaggtgccgcttgtaccatcgatagatccttcggtactattgtcaaccacttgcaccaccacatcggcgattcccaccaatgtcaccacatgttctctcaaatgccattctacaatgctgtcgaagctactaagtatctaaaggccaagctaggtaagtactacatcttcgacgacactccaattgccaaggctttgtacagaaactggagagaatgtaaattcgtcgaagacgaaggtgatgttgttttctacaagcactaa

SEQ ID NO: 570 - DNA, 1212 bp, Artificial sequence
  Delta-15 Desaturase
atggcccctccacacgtcgtcgacgaacaagttagaagaagaatcgttgttgaagacgagattaagtcaaagaaacaattcgagagaaactacgtcccaatggatttcactatcaaggaaatcagagacgctatccctgctcacttattcatcagagacacaactaagtcaattctacacgttgtcaaagatttggttaccattgccattgttttctactgtgctaccttcatcgaaactttgccatccttggctttgagagttccagcatggatcacctactggattattcaaggtaccgtcatggttggtccatggattttggctcacgaatgtggtcacggtgccttttctgaatacaagtcgttcaactccattatcggttgggtcttgcattccgctttgttggttccttatcaggcatgggcaatgtcacactctaagcaccacaaggatactggtcatatggagaaggatgtcgtcttcattccagctactcgttcctacaaaggtctacctgccctagaaaagcctgctgttgaagaagaagtttctgaacaagaacatcaccaccatgaagaatccatctttgctgaaaccccaatctacactttgggtgccttgttgttcgttttaaccttcggttggccattgtacctaattgttaacttctctggtcacgaagccccacactgggtcaaccacttccaaactgttgctccattgtacgaaccacaccaaagaaagaacatcttttactctaactgtggtattgttgctatgggctctattttgacctatttgtccatggttttctctccattaactgttttcatgtactacggtatcccatacttgggtgttaatgcttggattgtttgcattacttacttacaacacactgatccaaaggttcctcacttcagagacaacgaatggaattttcaaagaggtgccgcttgtaccatcgatagatccttcggtactattgtcaaccacttgcaccaccacatcggcgattcccaccaatgtcaccacatgttctctcaaatgccattctacaatgctgtcgaagctactaagtatctaaaggccaagctaggtaagtactacatcttcgacgacactccaattgccaaggctttgtacagaaactggagagaatgtaaattcgtcgaagacgaaggtgatgttgttttctacaagcactaa

SEQ ID NO: 571 - DNA, 1212 bp, Artificial sequence
  Delta-15 Desaturase
atggcccctccacacgtcgtcgacgaacaagttagaagaagaatcgttgttgaagacgagattaagtcaaagaaacaattcgagagaaactacgtcccaatggatttcactatcaaggaaatcagagacgctatccctgctcacttattcatcagagacacaactaagtcaattctacacgttgtcaaagatttggttaccattgccattgttttctactgtgctaccttcatcgaaactttgccatccttggctttgagagttccagcatggatcacctactggattattcaaggtaccgtcatggttggtccatggattttggctcacgaatgtggtcacggtgccttttctaattccaggtcgttcaacaccattttcggttgggtcttgcattccgctttgttggttccttatcaggcatgggcaatgtcacactctaagcaccacaagtttactggtgatatgaagaaggatctggtcttcattccagctactcgttcctacaaaggtctacctgccctagaaaagcctgctgttgaagaagaagtttctgaacaagaacatcaccaccatgaagaatccatctttgctgaaaccccaatctacactttgggtgccttgttgttcgttttaaccttcggttggccattgtacctaattgttaacttctctggtcacgaagccccacactgggtcaaccacttccaaactgttgctccattgtacgaaccacaccaaagaaagaacatcttttactctaactgtggtattgttgctatgggctctattttgacctatttgtccatggttttctctccattaactgttttcatgtactacggtatcccatacttgggtgttaatgcttggattgtttgcattacttacttacaacacactgatccaaaggttcctcacttcagagacaacgaatggaattttcaaagaggtgccgcttgtaccatcgatagatccttcggtactattgtcaaccacttgcaccaccacatcggcgattcccaccaatgtcaccacatgttctctcaaatgccattctacaatgctgtcgaagctactaagtatctaaaggccaagctaggtaagtactacatcttcgacgacactccaattgccaaggctttgtacagaaactggagagaatgtaaattcgtcgaagacgaaggtgatgttgttttctacaagcactaa

SEQ ID NO: 572 - DNA, 1212 bp, Artificial sequence
  Delta-15 Desaturase
atggcccctccacacgtcgtcgacgaacaagttagaagaagaatcgttgttgaagacgagattaagtcaaagaaacaattcgagagaaactacgtcccaatggatttcactatcaaggaaatcagagacgctatccctgctcacttattcatcagagacacaactaagtcaattctacacgttgtcaaagatttggttaccattgccattgttttctactgtgctaccttcatcgaaactttgccatccttggctttgagagttccagcatggatcacctactggattattcaaggtaccgtcatggttggtccatggattttggctcacgaatgtggtcacggtgccttttctaaacccacgtcgttcaactccattatcggttgggtcttgcattccgctttgttggttccttatcaggcatgggcaatgtcacactctaagcaccacaagggtactggttccatgactaaggatgttgtcttcattccagctactcgttcctacaaaggtctacctgccctagaaaagcctgctgttgaagaagaagtttctgaacaagaacatcaccaccatgaagaatccatctttgctgaaaccccaatctacactttgggtgccttgttgttcgttttaaccttcggttggccattgtacctaattgttaacttctctggtcacgaagccccacactgggtcaaccacttccaaactgttgctccattgtacgaaccacaccaaagaaagaacatcttttactctaactgtggtattgttgctatgggctctattttgacctatttgtccatggttttctctccattaactgttttcatgtactacggtatcccatacttgggtgttaatgcttggattgtttgcattacttacttacaacacactgatccaaaggttcctcacttcagagacaacgaatggaattttcaaagaggtgccgcttgtaccatcgatagatccttcggtactattgtcaaccacttgcaccaccacatcggcgattcccaccaatgtcaccacatgttctctcaaatgccattctacaatgctgtcgaagctactaagtatctaaaggccaagctaggtaagtactacatcttcgacgacactccaattgccaaggctttgtacagaaactggagagaatgtaaattcgtcgaagacgaaggtgatgttgttttctacaagcactaa

SEQ ID NO: 573 - DNA, 1212 bp, Artificial sequence
  Delta-15 Desaturase
atggcccctccacacgtcgtcgacgaacaagttagaagaagaatcgttgttgaagacgagattaagtcaaagaaacaattcgagagaaactacgtcccaatggatttcactatcaaggaaatcagagacgctatccctgctcacttattcatcagagacacaactaagtcaattctacacgttgtcaaagatttggttaccattgccattgttttctactgtgctaccttcatcgaaactttgccatccttggctttgagagttccagcatggatcacctactggattattcaaggtaccgtcatggttggtccatggattttggctcacgaatgtggtcacggtgccttttctaattacaagacgttcaactacattttcggttgggtcttgcattccgctttgttggttccttatcaggcatgggcaatgtcacactctaagcaccacaagggtactggttccatgactaaggatgttgtcttcattccagctactcgttcctacaaaggtctacctgccctagaaaagcctgctgttgaagaagaagtttctgaacaagaacatcaccaccatgaagaatccatctttgctgaaaccccaatctacactttgggtgccttgttgttcgttttaaccttcggttggccattgtacctaattgttaacttctctggtcacgaagccccacactgggtcaaccacttccaaactgttgctccattgtacgaaccacaccaaagaaagaacatcttttactctaactgtggtattgttgctatgggctctattttgacctatttgtccatggttttctctccattaactgttttcatgtactacggtatcccatacttgggtgttaatgcttggattgtttgcattacttacttacaacacactgatccaaaggttcctcacttcagagacaacgaatggaattttcaaagaggtgccgcttgtaccatcgatagatccttcggtactattgtcaaccacttgcaccaccacatcggcgattcccaccaatgtcaccacatgttctctcaaatgccattctacaatgctgtcgaagctactaagtatctaaaggccaagctaggtaagtactacatcttcgacgacactccaattgccaaggctttgtacagaaactggagagaatgtaaattcgtcgaagacgaaggtgatgttgttttctacaagcactaa

SEQ ID NO: 574 - DNA, 1212 bp, Artificial sequence
  Delta-15 Desaturase
atggcccctccacacgtcgtcgacgaacaagttagaagaagaatcgttgttgaagacgagattaagtcaaagaaacaattcgagagaaactacgtcccaatggatttcactatcaaggaaatcagagacgctatccctgctcacttattcatcagagacacaactaagtcaattctacacgttgtcaaagatttggttaccattgccattgttttctactgtgctaccttcatcgaaactttgccatccttggctttgagagttccagcatggatcacctactggattattcaaggtaccgtcatggttggtccatggattttggctcacgaatgtggtcacggtgccttttctcagtacaagtcgatcaacaacattatcggttgggtcttgcattccgctttgttggttccttatcaggcatgggcaatgtcacactctaagcaccacaagggtactggttccatgactaaggatgttgtcttcattccagctactcgttcctacaaaggtctacctgccctagaaaagcctgctgttgaagaagaagtttctgaacaagaacatcaccaccatgaagaatccatctttgctgaaaccccaatctacactttgggtgccttgttgttcgttttaaccttcggttggccattgtacctaattgttaacttctctggtcacgaagccccacactgggtcaaccacttccaaactgttgctccattgtacgaaccacaccaaagaaagaacatcttttactctaactgtggtattgttgctatgggctctattttgacctatttgtccatggttttctctccattaactgttttcatgtactacggtatcccatacttgggtgttaatgcttggattgtttgcattacttacttacaacacactgatccaaaggttcctcacttcagagacaacgaatggaattttcaaagaggtgccgcttgtaccatcgatagatccttcggtactattgtcaaccacttgcaccaccacatcggcgattcccaccaatgtcaccacatgttctctcaaatgccattctacaatgctgtcgaagctactaagtatctaaaggccaagctaggtaagtactacatcttcgacgacactccaattgccaaggctttgtacagaaactggagagaatgtaaattcgtcgaagacgaaggtgatgttgttttctacaagcactaa

SEQ ID NO: 575 - DNA, 1212 bp, Artificial sequence
  Delta-15 Desaturase
atggcccctccacacgtcgtcgacgaacaagttagaagaagaatcgttgttgaagacgagattaagtcaaagaaacaattcgagagaaactacgtcccaatggatttcactatcaaggaaatcagagacgctatccctgctcacttattcatcagagacacaactaagtcaattctacacgttgtcaaagatttggttaccattgccattgttttctactgtgctaccttcatcgaaactttgccatccttggctttgagagttccagcatggatcacctactggattattcaaggtaccgtcatggttggtccatggattttggctcacgaatgtggtcacggtgccttttctgattacaagtcgttcaactacattatcggttgggtcttgcattccgctttgttggttccttatcaggcatgggcaatgtcacactctaagcaccacaagggtactggttccatgactaaggatgttgtcttcattccagctactcgttcctacaaaggtctacctgccctagaaaagcctgctgttgaagaagaagtttctgaacaagaacatcaccaccatgaagaatccatctttgctgaaaccccaatctacactttgggtgccttgttgttcgttttaaccttcggttggccattgtacctaattgttaacttctctggtcacgaagccccacactgggtcaaccacttccaaactgttgctccattgtacgaaccacaccaaagaaagaacatcttttactctaactgtggtattgttgctatgggctctattttgacctatttgtccatggttttctctccattaactgttttcatgtactacggtatcccatacttgggtgttaatgcttggattgtttgcattacttacttacaacacactgatccaaaggttcctcacttcagagacaacgaatggaattttcaaagaggtgccgcttgtaccatcgatagatccttcggtactattgtcaaccacttgcaccaccacatcggcgattcccaccaatgtcaccacatgttctctcaaatgccattctacaatgctgtcgaagctactaagtatctaaaggccaagctaggtaagtactacatcttcgacgacactccaattgccaaggctttgtacagaaactggagagaatgtaaattcgtcgaagacgaaggtgatgttgttttctacaagcactaa

SEQ ID NO: 576 - DNA, 1212 bp, Artificial sequence
  Delta-15 Desaturase
atggcccctccacacgtcgtcgacgaacaagttagaagaagaatcgttgttgaagacgagattaagtcaaagaaacaattcgagagaaactacgtcccaatggatttcactatcaaggaaatcagagacgctatccctgctcacttattcatcagagacacaactaagtcaattctacacgttgtcaaagatttggttaccattgccattgttttctactgtgctaccttcatcgaaactttgccatccttggctttgagagttccagcatggatcacctactggattattcaaggtaccgtcatggttggtccatggattttggctcacgaatgtggtcacggtgccttttctaattacaagtcgatcaactacattttcggttgggtcttgcattccgctttgttggttccttatcaggcatgggcaatgtcacactctaagcaccacaagtctactggtcatatggcgaaggatctcgtcttcattccagctactcgttcctacaaaggtctacctgccctagaaaagcctgctgttgaagaagaagtttctgaacaagaacatcaccaccatgaagaatccatctttgctgaaaccccaatctacactttgggtgccttgttgttcgttttaaccttcggttggccattgtacctaattgttaacttctctggtcacgaagccccacactgggtcaaccacttccaaactgttgctccattgtacgaaccacaccaaagaaagaacatcttttactctaactgtggtattgttgctatgggctctattttgacctatttgtccatggttttctctccattaactgttttcatgtactacggtatcccatacttgggtgttaatgcttggattgtttgcattacttacttacaacacactgatccaaaggttcctcacttcagagacaacgaatggaattttcaaagaggtgccgcttgtaccatcgatagatccttcggtactattgtcaaccacttgcaccaccacatcggcgattcccaccaatgtcaccacatgttctctcaaatgccattctacaatgctgtcgaagctactaagtatctaaaggccaagctaggtaagtactacatcttcgacgacactccaattgccaaggctttgtacagaaactggagagaatgtaaattcgtcgaagacgaaggtgatgttgttttctacaagcactaa

SEQ ID NO: 577 - DNA, 1212 bp, Artificial sequence
  Delta-15 Desaturase
atggcccctccacacgtcgtcgacgaacaagttagaagaagaatcgttgttgaagacgagattaagtcaaagaaacaattcgagagaaactacgtcccaatggatttcactatcaaggaaatcagagacgctatccctgctcacttattcatcagagacacaactaagtcaattctacacgttgtcaaagatttggttaccattgccattgttttctactgtgctaccttcatcgaaactttgccatccttggctttgagagttccagcatggatcacctactggattattcaaggtaccgtcatggttggtccatggattttggctcacgaatgtggtcacggtgccttttctaagcccaagaggttcaacaccattatgggttgggtcttgcattccgctttgttggttccttatcaggcatgggcaatgtcacactctaagcaccacaagggtactggttccatgactaaggatgttgtcttcattccagctactcgttcctacaaaggtctacctgccctagaaaagcctgctgttgaagaagaagtttctgaacaagaacatcaccaccatgaagaatccatctttgctgaaaccccaatctacactttgggtgccttgttgttcgttttaaccttcggttggccattgtacctaattgttaacttctctggtcacgaagccccacactgggtcaaccacttccaaactgttgctccattgtacgaaccacaccaaagaaagaacatcttttactctaactgtggtattgttgctatgggctctattttgacctatttgtccatggttttctctccattaactgttttcatgtactacggtatcccatacttgggtgttaatgcttggattgtttgcattacttacttacaacacactgatccaaaggttcctcacttcagagacaacgaatggaattttcaaagaggtgccgcttgtaccatcgatagatccttcggtactattgtcaaccacttgcaccaccacatcggcgattcccaccaatgtcaccacatgttctctcaaatgccattctacaatgctgtcgaagctactaagtatctaaaggccaagctaggtaagtactacatcttcgacgacactccaattgccaaggctttgtacagaaactggagagaatgtaaattcgtcgaagacgaaggtgatgttgttttctacaagcactaa

SEQ ID NO: 578 - DNA, 1212 bp, Artificial sequence
  Delta-15 Desaturase
atggcccctccacacgtcgtcgacgaacaagttagaagaagaatcgttgttgaagacgagattaagtcaaagaaacaattcgagagaaactacgtcccaatggatttcactatcaaggaaatcagagacgctatccctgctcacttattcatcagagacacaactaagtcaattctacacgttgtcaaagatttggttaccattgccattgttttctactgtgctaccttcatcgaaactttgccatccttggctttgagagttccagcatggatcacctactggattattcaaggtaccgtcatggttggtccatggattttggctcacgaatgtggtcacggtgccttttctgatcccaagtcgttcaactccattatcggttgggtcttgcattccgctttgttggttccttatcaggcatgggcaatgtcacactctaagcaccacaagggtactggttccatgactaaggatgttgtcttcattccagctactcgttcctacaaaggtctacctgccctagaaaagcctgctgttgaagaagaagtttctgaacaagaacatcaccaccatgaagaatccatctttgctgaaaccccaatctacactttgggtgccttgttgttcgttttaaccttcggttggccattgtacctaattgttaacttctctggtcacgaagccccacactgggtcaaccacttccaaactgttgctccattgtacgaaccacaccaaagaaagaacatcttttactctaactgtggtattgttgctatgggctctattttgacctatttgtccatggttttctctccattaactgttttcatgtactacggtatcccatacttgggtgttaatgcttggattgtttgcattacttacttacaacacactgatccaaaggttcctcacttcagagacaacgaatggaattttcaaagaggtgccgcttgtaccatcgatagatccttcggtactattgtcaaccacttgcaccaccacatcggcgattcccaccaatgtcaccacatgttctctcaaatgccattctacaatgctgtcgaagctactaagtatctaaaggccaagctaggtaagtactacatcttcgacgacactccaattgccaaggctttgtacagaaactggagagaatgtaaattcgtcgaagacgaaggtgatgttgttttctacaagcactaa

SEQ ID NO: 579 - DNA, 1212 bp, Artificial sequence
  Delta-15 Desaturase
atggcccctccacacgtcgtcgacgaacaagttagaagaagaatcgttgttgaagacgagattaagtcaaagaaacaattcgagagaaactacgtcccaatggatttcactatcaaggaaatcagagacgctatccctgctcacttattcatcagagacacaactaagtcaattctacacgttgtcaaagatttggttaccattgccattgttttctactgtgctaccttcatcgaaactttgccatccttggctttgagagttccagcatggatcacctactggattattcaaggtaccgtcatggttggtccatggattttggctcacgaatgtggtcacggtgccttttctaagcacaagtcgatcaacaccattttgggttgggtcttgcattccgctttgttggttccttatcaggcatgggcaatgtcacactctaagcaccacaagtgtactggttccatgactaaggatgttgtcttcattccagctactcgttcctacaaaggtctacctgccctagaaaagcctgctgttgaagaagaagtttctgaacaagaacatcaccaccatgaagaatccatctttgctgaaaccccaatctacactttgggtgccttgttgttcgttttaaccttcggttggccattgtacctaattgttaacttctctggtcacgaagccccacactgggtcaaccacttccaaactgttgctccattgtacgaaccacaccaaagaaagaacatcttttactctaactgtggtattgttgctatgggctctattttgacctatttgtccatggttttctctccattaactgttttcatgtactacggtatcccatacttgggtgttaatgcttggattgtttgcattacttacttacaacacactgatccaaaggttcctcacttcagagacaacgaatggaattttcaaagaggtgccgcttgtaccatcgatagatccttcggtactattgtcaaccacttgcaccaccacatcggcgattcccaccaatgtcaccacatgttctctcaaatgccattctacaatgctgtcgaagctactaagtatctaaaggccaagctaggtaagtactacatcttcgacgacactccaattgccaaggctttgtacagaaactggagagaatgtaaattcgtcgaagacgaaggtgatgttgttttctacaagcactaa

SEQ ID NO: 580 - DNA, 1212 bp, Artificial sequence
  Delta-15 Desaturase
atggcccctccacacgtcgtcgacgaacaagttagaagaagaatcgttgttgaagacgagattaagtcaaagaaacaattcgagagaaactacgtcccaatggatttcactatcaaggaaatcagagacgctatccctgctcacttattcatcagagacacaactaagtcaattctacacgttgtcaaagatttggttaccattgccattgttttctactgtgctaccttcatcgaaactttgccatccttggctttgagagttccagcatggatcacctactggattattcaaggtaccgtcatggttggtccatggattttggctcacgaatgtggtcacggtgccttttctgaacccaagtggatcaactacattatcggttgggtcttgcattccgctttgttggttccttatcaggcatgggcaatgtcacactctaagcaccacaagggtactggttccatgactaaggatgttgtcttcattccagctactcgttcctacaaaggtctacctgccctagaaaagcctgctgttgaagaagaagtttctgaacaagaacatcaccaccatgaagaatccatctttgctgaaaccccaatctacactttgggtgccttgttgttcgttttaaccttcggttggccattgtacctaattgttaacttctctggtcacgaagccccacactgggtcaaccacttccaaactgttgctccattgtacgaaccacaccaaagaaagaacatcttttactctaactgtggtattgttgctatgggctctattttgacctatttgtccatggttttctctccattaactgttttcatgtactacggtatcccatacttgggtgttaatgcttggattgtttgcattacttacttacaacacactgatccaaaggttcctcacttcagagacaacgaatggaattttcaaagaggtgccgcttgtaccatcgatagatccttcggtactattgtcaaccacttgcaccaccacatcggcgattcccaccaatgtcaccacatgttctctcaaatgacattctacaatgctgtcgaagctactaagtatctaaaggccaagctaggtaagtactacatcttcgacgacactccaattgccaaggctttgtacagaaactggagagaatgtaaattcgtcgaagacgaaggtgatgttgttttctacaagcactaa

SEQ ID NO: 581 - DNA, 1212 bp, Artificial sequence
  Delta-15 Desaturase
atggcccctccacacgtcgtcgacgaacaagttagaagaagaatcgttgttgaagacgagattaagtcaaagaaacaattcgagagaaactacgtcccaatggatttcactatcaaggaaatcagagacgctatccctgctcacttattcatcagagacacaactaagtcaattctacacgttgtcaaagatttggttaccattgccattgttttctactgtgctaccttcatcgaaactttgccatccttggctttgagagttccagcatggatcacctactggattattcaaggtaccgtcatggttggtccatggattttggctcacgaatgtggtcacggtgccttttctcaatacacgaggatcaacaacattttcggttgggtcttgcattccgctttgttggttccttatcaggcatgggcaatgtcacactctaagcaccacaagggtactggttccatgactaaggatgttgtcttcattccagctactcgttcctacaaaggtctacctgccctagaaaagcctgctgttgaagaagaagtttctgaacaagaacatcaccaccatgaagaatccatctttgctgaaaccccaatctacactttgggtgccttgttgttcgttttaaccttcggttggccattgtacctaattgttaacttctctggtcacgaagccccacactgggtcaaccacttccaaactgttgctccattgtacgaaccacaccaaagaaagaacatcttttactctaactgtggtattgttgctatgggctctattttgacctatttgtccatggttttctctccattaactgttttcatgtactacggtatcccatacttgggtgttaatgcttggattgtttgcattacttacttacaacacactgatccaaaggttcctcacttcagagacaacgaatggaattttcaaagaggtgccgcttgtaccatcgatagatccttcggtactattgtcaaccacttgcaccaccacatcggcgattcccaccaatgtcaccacatgttctctcaaatgccattctacaatgctgtcgaagctactaagtatctaaaggccaagctaggtaagtactacatcttcgacgacactccaattgccaaggctttgtacagaaactggagagaatgtaaattcgtcgaagacgaaggtgatgttgttttctacaagcactaa

SEQ ID NO: 582 - DNA, 1212 bp, Artificial sequence
  Delta-15 Desaturase
atggcccctccacacgtcgtcgacgaacaagttagaagaagaatcgttgttgaagacgagattaagtcaaagaaacaattcgagagaaactacgtcccaatggatttcactatcaaggaaatcagagacgctatccctgctcacttattcatcagagacacaactaagtcaattctacacgttgtcaaagatttggttaccattgccattgttttctactgtgctaccttcatcgaaactttgccatccttggctttgagagttccagcatggatcacctactggattattcaaggtaccgtcatggttggtccatggattttggctcacgaatgtggtcacggtgccttttctaagcacaagaggatcaacaccattatcggttgggtcttgcattccgctttgttggttccttatcaggcatgggcaatgtcacactctaagcaccacaagggtactggttccatgactaaggatgttgtcttcattccagctactcgttcctacaaaggtctacctgccctagaaaagcctgctgttgaagaagaagtttctgaacaagaacatcaccaccatgaagaatccatctttgctgaaaccccaatctacactttgggtgccttgttgttcgttttaaccttcggttggccattgtacctaattgttaacttctctggtcacgaagccccacactgggtcaaccacttccaaactgttgctccattgtacgaaccacaccaaagaaagaacatcttttactctaactgtggtattgttgctatgggctctattttgacctatttgtccatggttttctctccattaactgttttcatgtactacggtatcccatacttgggtgttaatgcttggattgtttgcattacttacttacaacacactgatccaaaggttcctcacttcagagacaacgaatggaattttcaaagaggtgccgcttgtaccatcgatagatccttcggtactattgtcaaccacttgcaccaccacatcggcgattcccaccaatgtcaccacatgttctctcaaatgccattctacaatgctgtcgaagctactaagtatctaaaggccaagctaggtaagtactacatcttcgacgacactccaattgccaaggctttgtacagaaactggagagaatgtaaattcgtcgaagacgaaggtgatgttgttttctacaagcactaa

SEQ ID NO: 583 - DNA, 1212 bp, Artificial sequence
  Delta-15 Desaturase
atggcccctccacacgtcgtcgacgaacaagttagaagaagaatcgttgttgaagacgagattaagtcaaagaaacaattcgagagaaactacgtcccaatggatttcactatcaaggaaatcagagacgctatccctgctcacttattcatcagagacacaactaagtcaattctacacgttgtcaaagatttggttaccattgccattgttttctactgtgctaccttcatcgaaactttgccatccttggctttgagagttccagcatggatcacctactggattattcaaggtaccgtcatggttggtccatggattttggctcacgaatgtggtcacggtgccttttctcattccacgtcgatcaactccattttcggttgggtcttgcattccgctttgttggttccttatcaggcatgggcaatgtcacactctaagcaccacaagggtactggttccatgactaaggatgttgtcttcattccagctactcgttcctacaaaggtctacctgccctagaaaagcctgctgttgaagaagaagtttctgaacaagaacatcaccaccatgaagaatccatctttgctgaaaccccaatctacactttgggtgccttgttgttcgttttaaccttcggttggccattgtacctaattgttaacttctctggtcacgaagccccacactgggtcaaccacttccaaactgttgctccattgtacgaaccacaccaaagaaagaacatcttttactctaactgtggtattgttgctatgggctctattttgacctatttgtccatggttttctctccattaactgttttcatgtactacggtatcccatacttgggtgttaatgcttggattgtttgcattacttacttacaacacactgatccaaaggttcctcacttcagagacaacgaatggaattttcaaagaggtgccgcttgtaccatcgatagatccttcggtactattgtcaaccacttgcaccaccacatcggcgattcccaccaatgtcaccacatgttctctcaaatgccattctacaatgctgtcgaagctactaagtatctaaaggccaagctaggtaagtactacatcttcgacgacactccaattgccaaggctttgtacagaaactggagagaatgtaaattcgtcgaagacgaaggtgatgttgttttctacaagcactaa

SEQ ID NO: 584 - DNA, 1212 bp, Artificial sequence
  Delta-15 Desaturase
atggcccctccacacgtcgtcgacgaacaagttagaagaagaatcgttgttgaagacgagattaagtcaaagaaacaattcgagagaaactacgtcccaatggatttcactatcaaggaaatcagagacgctatccctgctcacttattcatcagagacacaactaagtcaattctacacgttgtcaaagatttggttaccattgccattgttttctactgtgctaccttcatcgaaactttgccatccttggctttgagagttccagcatggatcacctactggattattcaaggtaccgtcatggttggtccatggattttggctcacgaatgtggtcacggtgccttttctaagtacaggacgttcaacaccattatcggttgggtcttgcattccgctttgttggttccttatcaggcatgggcaatgtcacactctaagcaccacaagtatactggtcatatggcgaaggatatcgtcttcattccagctactcgttcctacaaaggtctacctgccctagaaaagcctgctgttgaagaagaagtttctgaacaagaacatcaccaccatgaagaatccatctttgctgaaaccccaatctacactttgggtgccttgttgttcgttttaaccttcggttggccattgtacctaattgttaacttctctggtcacgaagccccacactgggtcaaccacttccaaactgttgctccattgtacgaaccacaccaaagaaagaacatcttttactctaactgtggtattgttgctatgggctctattttgacctatttgtccatggttttctctccattaactgttttcatgtactacggtatcccatacttgggtgttaatgcttggattgtttgcattacttacttacaacacactgatccaaaggttcctcacttcagagacaacgaatggaattttcaaagaggtgccgcttgtaccatcgatagatccttcggtactattgtcaaccacttgcaccaccacatcggcgattcccaccaatgtcaccacatgttctctcaaatgccattctacaatgctgtcgaagctactaagtatctaaaggccaagctaggtaagtactacatcttcgacgacactccaattgccaaggctttgtacagaaactggagagaatgtaaattcgtcgaagacgaaggtgatgttgttttctacaagcactaa

SEQ ID NO: 585 - DNA, 1212 bp, Artificial sequence
  Delta-15 Desaturase
atggcccctccacacgtcgtcgacgaacaagttagaagaagaatcgttgttgaagacgagattaagtcaaagaaacaattcgagagaaactacgtcccaatggatttcactatcaaggaaatcagagacgctatccctgctcacttattcatcagagacacaactaagtcaattctacacgttgtcaaagatttggttaccattgccattgttttctactgtgctaccttcatcgaaactttgccatccttggctttgagagttccagcatggatcacctactggattattcaaggtaccgtcatggttggtccatggattttggctcacgaatgtggtcacggtgccttttctcaacacacgacgttcaacaccattttcggttgggtcttgcattccgctttgttggttccttatcaggcatgggcaatgtcacactctaagcaccacaagggtactggttccatgactaaggatgttgtcttcattccagctactcgttcctacaaaggtctacctgccctagaaaagcctgctgttgaagaagaagtttctgaacaagaacatcaccaccatgaagaatccatctttgctgaaaccccaatctacactttgggtgccttgttgttcgttttaaccttcggttggccattgtacctaattgttaacttctctggtcacgaagccccacactgggtcaaccacttccaaactgttgctccattgtacgaaccacaccaaagaaagaacatcttttactctaactgtggtattgttgctatgggctctattttgacctatttgtccatggttttctctccattaactgttttcatgtactacggtatcccatacttgggtgttaatgcttggattgtttgcattacttacttacaacacactgatccaaaggttcctcacttcagagacaacgaatggaattttcaaagaggtgccgcttgtaccatcgatagatccttcggtactattgtcaaccacttgcaccaccacatcggcgattcccaccaatgtcaccacatgttctctcaaatgccattctacaatgctgtcgaagctactaagtatctaaaggccaagctaggtaagtactacatcttcgacgacactccaattgccaaggctttgtacagaaactggagagaatgtaaattcgtcgaagacgaaggtgatgttgttttctacaagcactaa

SEQ ID NO: 586 - DNA, 1212 bp, Artificial sequence
  Delta-15 Desaturase
atggcccctccacacgtcgtcgacgaacaagttagaagaagaatcgttgttgaagacgagattaagtcaaagaaacaattcgagagaaactacgtcccaatggatttcactatcaaggaaatcagagacgctatccctgctcacttattcatcagagacacaactaagtcaattctacacgttgtcaaagatttggttaccattgccattgttttctactgtgctaccttcatcgaaactttgccatccttggctttgagagttccagcatggatcacctactggattattcaaggtaccgtcatggttggtccatggattttggctcacgaatgtggtcacggtgccttttctgaatccacgtcgttcaactacattatcggttgggtcttgcattccgctttgttggttccttatcaggcatgggcaatgtcacactctaagcaccacaagggtactggttccatgactaaggatgttgtcttcattccagctactcgttcctacaaaggtctacctgccctagaaaagcctgctgttgaagaagaagtttctgaacaagaacatcaccaccatgaagaatccatctttgctgaaaccccaatctacactttgggtgccttgttgttcgttttaaccttcggttggccattgtacctaattgttaacttctctggtcacgaagccccacactgggtcaaccacttccaaactgttgctccattgtacgaaccacaccaaagaaagaacatcttttactctaactgtggtattgttgctatgggctctattttgacctatttgtccatggttttctctccattaactgttttcatgtactacggtatcccatacttgggtgttaatgcttggattgtttgcattacttacttacaacacactgatccaaaggttcctcacttcagagacaacgaatggaattttcaaagaggtgccgcttgtaccatcgatagatccttcggtactattgtcaaccacttgcaccaccacatcggcgattcccaccaatgtcaccacatgttctctcaaatgccattctacaatgctgtcgaagctactaagtatctaaaggccaagctaggtaagtactacatcttcgacgacactccaattgccaaggctttgtacagaaactggagagaatgtaaattcgtcgaagacgaaggtgatgttgttttctacaagcactaa

SEQ ID NO: 587 - DNA, 1212 bp, Artificial sequence
  Delta-15 Desaturase
atggcccctccacacgtcgtcgacgaacaagttagaagaagaatcgttgttgaagacgagattaagtcaaagaaacaattcgagagaaactacgtcccaatggatttcactatcaaggaaatcagagacgctatccctgctcacttattcatcagagacacaactaagtcaattctacacgttgtcaaagatttggttaccattgccattgttttctactgtgctaccttcatcgaaactttgccatccttggctttgagagttccagcatggatcacctactggattattcaaggtaccgtcatggttggtccatggattttggctcacgaatgtggtcacggtgccttttctaattacaggaggttcaactccattatcggttgggtcttgcattccgctttgttggttccttatcaggcatgggcaatgtcacactctaagcaccacaagggtactggttccatgactaaggatgttgtcttcattccagctactcgttcctacaaaggtctacctgccctagaaaagcctgctgttgaagaagaagtttctgaacaagaacatcaccaccatgaagaatccatctttgctgaaaccccaatctacactttgggtgccttgttgttcgttttaaccttcggttggccattgtacctaattgttaacttctctggtcacgaagccccacactgggtcaaccacttccaaactgttgctccattgtacgaaccacaccaaagaaagaacatcttttactctaactgtggtattgttgctatgggctctattttgacctatttgtccatggttttctctccattaactgttttcatgtactacggtatcccatacttgggtgttaatgcttggattgtttgcattacttacttacaacacactgatccaaaggttcctcacttcagagacaacgaatggaattttcaaagaggtgccgcttgtaccatcgatagatccttcggtactattgtcaaccacttgcaccaccacatcggcgattcccaccaatgtcaccacatgttctctcaaatgccattctacaatgctgtcgaagctactaagtatctaaaggccaagctaggtaagtactacatcttcgacgacactccaattgccaaggctttgtacagaaactggagagaatgtaaattcgtcgaagacgaaggtgatgttgttttctacaagcactaa

SEQ ID NO: 588 - DNA, 1212 bp, Artificial sequence
  Delta-15 Desaturase
atggcccctccacacgtcgtcgacgaacaagttagaagaagaatcgttgttgaagacgagattaagtcaaagaaacaattcgagagaaactacgtcccaatggatttcactatcaaggaaatcagagacgctatccctgctcacttattcatcagagacacaactaagtcaattctacacgttgtcaaagatttggttaccattgccattgttttctactgtgctaccttcatcgaaactttgccatccttggctttgagagttccagcatggatcacctactggattattcaaggtaccgtcatggttggtccatggattttggctcacgaatgtggtcacggtgccttttctaaatacaggtggatcaacaacattttcggttgggtcttgcattccgctttgttggttccttatcaggcatgggcaatgtcacactctaagcaccacaagggtactggttccatgactaaggatgttgtcttcattccagctactcgttcctacaaaggtctacctgccctagaaaagcctgctgttgaagaagaagtttctgaacaagaacatcaccaccatgaagaatccatctttgctgaaaccccaatctacactttgggtgccttgttgttcgttttaaccttcggttggccattgtacctaattgttaacttctctggtcacgaagccccacactgggtcaaccacttccaaactgttgctccattgtacgaaccacaccaaagaaagaacatcttttactctaactgtggtattgttgctatgggctctattttgacctatttgtccatggttttctctccattaactgttttcatgtactacggtatcccatacttgggtgttaatgcttggattgtttgcattacttacttacaacacactgatccaaaggttcctcacttcagagacaacgaatggaattttcaaagaggtgccgcttgtaccatcgatagatccttcggtactattgtcaaccacttgcaccaccacatcggcgattcccaccaatgtcaccacatgttctctcaaatgccattctacaatgctgtcgaagctactaagtatctaaaggccaagctaggtaagtactacatcttcgacgacactccaattgccaaggctttgtacagaaactggagagaatgtaaattcgtcgaagacgaaggtgatgttgttttctacaagcactaa

SEQ ID NO: 589 - DNA, 1212 bp, Artificial sequence
  Delta-15 Desaturase
atggcccctccacacgtcgtcgacgaacaagttagaagaagaatcgttgttgaagacgagattaagtcaaagaaacaattcgagagaaactacgtcccaatggatttcactatcaaggaaatcagagacgctatccctgctcacttattcatcagagacacaactaagtcaattctacacgttgtcaaagatttggttaccattgccattgttttctactgtgctaccttcatcgaaactttgccatccttggctttgagagttccagcatggatcacctactggattattcaaggtaccgtcatggttggtccatggattttggctcacgaatgtggtcacggtgccttttctaaacccaggtcgttcaacaacattttgggttgggtcttgcattccgctttgttggttccttatcaggcatgggcaatgtcacactctaagcaccacaagtgtactggttccatgactaaggatgttgtcttcattccagctactcgttcctacaaaggtctacctgccctagaaaagcctgctgttgaagaagaagtttctgaacaagaacatcaccaccatgaagaatccatctttgctgaaaccccaatctacactttgggtgccttgttgttcgttttaaccttcggttggccattgtacctaattgttaacttctctggtcacgaagccccacactgggtcaaccacttccaaactgttgctccattgtacgaaccacaccaaagaaagaacatcttttactctaactgtggtattgttgctatgggctctattttgacctatttgtccatggttttctctccattaactgttttcatgtactacggtatcccatacttgggtgttaatgcttggattgtttgcattacttacttacaacacactgatccaaaggttcctcacttcagagacaacgaatggaattttcaaagaggtgccgcttgtaccatcgatagatccttcggtactattgtcaaccacttgcaccaccacatcggcgattcccaccaatgtcaccacatgttctctcaaatgccattctacaatgctgtcgaagctactaagtatctaaaggccaagctaggtaagtactacatcttcgacgacactccaattgccaaggctttgtacagaaactggagagaatgtaaattcgtcgaagacgaaggtgatgttgttttctacaagcactaa

SEQ ID NO: 590 - DNA, 1212 bp, Artificial sequence
  Delta-15 Desaturase
atggcccctccacacgtcgtcgacgaacaagttagaagaagaatcgttgttgaagacgagattaagtcaaagaaacaattcgagagaaactacgtcccaatggatttcactatcaaggaaatcagagacgctatccctgctcacttattcatcagagacacaactaagtcaattctacacgttgtcaaagatttggttaccattgccattgttttctactgtgctaccttcatcgaaactttgccatccttggctttgagagttccagcatggatcacctactggattattcaaggtaccgtcatggttggtccatggattttggctcacgaatgtggtcacggtgccttttctaaccacaagtggatcaactccattttgggttgggtcttgcattccgctttgttggttccttatcaggcatgggcaatgtcacactctaagcaccacaagtatactggtcatatgtcgaaggatctcgtcttcattccagctactcgttcctacaaaggtctacctgccctagaaaagcctgctgttgaagaagaagtttctgaacaagaacatcaccaccatgaagaatccatctttgctgaaaccccaatctacactttgggtgccttgttgttcgttttaaccttcggttggccattgtacctaattgttaacttctctggtcacgaagccccacactgggtcaaccacttccaaactgttgctccattgtacgaaccacaccaaagaaagaacatcttttactctaactgtggtattgttgctatgggctctattttgacctatttgtccatggttttctctccattaactgttttcatgtactacggtatcccatacttgggtgttaatgcttggattgtttgcattacttacttacaacacactgatccaaaggttcctcacttcagagacaacgaatggaattttcaaagaggtgccgcttgtaccatcgatagatccttcggtactattgtcaaccacttgcaccaccacatcggcgattcccaccaatgtcaccacatgttctctcaaatgccattctacaatgctgtcgaagctactaagtatctaaaggccaagctaggtaagtactacatcttcgacgacactccaattgccaaggctttgtacagaaactggagagaatgtaaattcgtcgaagacgaaggtgatgttgttttctacaagcactaa

SEQ ID NO: 591 - DNA, 1212 bp, Artificial sequence
  Delta-15 Desaturase
atggcccctccacacgtcgtcgacgaacaagttagaagaagaatcgttgttgaagacgagattaagtcaaagaaacaattcgagagaaactacgtcccaatggatttcactatcaaggaaatcagagacgctatccctgctcacttattcatcagagacacaactaagtcaattctacacgttgtcaaagatttggttaccattgccattgttttctactgtgctaccttcatcgaaactttgccatccttggctttgagagttccagcatggatcacctactggattattcaaggtaccgtcatggttggtccatggattttggctcacgaatgtggtcacggtgccttttctaaacacacgaggatcaacaccattttcggttgggtcttgcattccgctttgttggttccttatcaggcatgggcaatgtcacactctaagcaccacaagtctactggtaatatggcgaaggatatggtcttcattccagctactcgttcctacaaaggtctacctgccctagaaaagcctgctgttgaagaagaagtttctgaacaagaacatcaccaccatgaagaatccatctttgctgaaaccccaatctacactttgggtgccttgttgttcgttttaaccttcggttggccattgtacctaattgttaacttctctggtcacgaagccccacactgggtcaaccacttccaaactgttgctccattgtacgaaccacaccaaagaaagaacatcttttactctaactgtggtattgttgctatgggctctattttgacctatttgtccatggttttctctccattaactgttttcatgtactacggtatcccatacttgggtgttaatgcttggattgtttgcattacttacttacaacacactgatccaaaggttcctcacttcagagacaacgaatggaattttcaaagaggtgccgcttgtaccatcgatagatccttcggtactattgtcaaccacttgcaccaccacatcggcgattcccaccaatgtcaccacatgttctctcaaatgccattctacaatgctgtcgaagctactaagtatctaaaggccaagctaggtaagtactacatcttcgacgacactccaattgccaaggctttgtacagaaactggagagaatgtaaattcgtcgaagacgaaggtgatgttgttttctacaagcactaa

SEQ ID NO: 592 - DNA, 1212 bp, Artificial sequence
  Delta-15 Desaturase
atggcccctccacacgtcgtcgacgaacaagttagaagaagaatcgttgttgaagacgagattaagtcaaagaaacaattcgagagaaactacgtcccaatggatttcactatcaaggaaatcagagacgctatccctgctcacttattcatcagagacacaactaagtcaattctacacgttgtcaaagatttggttaccattgccattgttttctactgtgctaccttcatcgaaactttgccatccttggctttgagagttccagcatggatcacctactggattattcaaggtaccgtcatggttggtccatggattttggctcacgaatgtggtcacggtgccttttctaaacccacgtcgttcaactccattttcggttgggtcttgcattccgctttgttggttccttatcaggcatgggcaatgtcacactctaagcaccacaagggtactggttccatgactaaggatgttgtcttcattccagctactcgttcctacaaaggtctacctgccctagaaaagcctgctgttgaagaagaagtttctgaacaagaacatcaccaccatgaagaatccatctttgctgaaaccccaatctacactttgggtgccttgttgttcgttttaaccttcggttggccattgtacctaattgttaacttctctggtcacgaagccccacactgggtcaaccacttccaaactgttgctccattgtacgaaccacaccaaagaaagaacatcttttactctaactgtggtattgttgctatgggctctattttgacctatttgtccatggttttctctccattaactgttttcatgtactacggtatcccatacttgggtgttaatgcttggattgtttgcattacttacttacaacacactgatccaaaggttcctcacttcagagacaacgaatggaattttcaaagaggtgccgcttgtaccatcgatagatccttcggtactattgtcaaccacttgcaccaccacatcggcgattcccaccaatgtcaccacatgttctctcaaatgccattctacaatgctgtcgaagctactaagtatctaaaggccaagctaggtaagtactacatcttcgacgacactccaattgccaaggctttgtacagaaactggagagaatgtaaattcgtcgaagacgaaggtgatgttgttttctacaagcactaa

SEQ ID NO: 593 - DNA, 1212 bp, Artificial sequence
  Delta-15 Desaturase
atggcccctccacacgtcgtcgacgaacaagttagaagaagaatcgttgttgaagacgagattaagtcaaagaaacaattcgagagaaactacgtcccaatggatttcactatcaaggaaatcagagacgctatccctgctcacttattcatcagagacacaactaagtcaattctacacgttgtcaaagatttggttaccattgccattgttttctactgtgctaccttcatcgaaactttgccatccttggctttgagagttccagcatggatcacctactggattattcaaggtaccgtcatggttggtccatggattttggctcacgaatgtggtcacggtgccttttctaagtacaagtcgttcaacaacattttgggttgggtcttgcattccgctttgttggttccttatcaggcatgggcaatgtcacactctaagcaccacaagtatactggtgatatgtcgaaggatttggtcttcattccagctactcgttcctacaaaggtctacctgccctagaaaagcctgctgttgaagaagaagtttctgaacaagaacatcaccaccatgaagaatccatctttgctgaaaccccaatctacactttgggtgccttgttgttcgttttaaccttcggttggccattgtacctaattgttaacttctctggtcacgaagccccacactgggtcaaccacttccaaactgttgctccattgtacgaaccacaccaaagaaagaacatcttttactctaactgtggtattgttgctatgggctctattttgacctatttgtccatggttttctctccattaactgttttcatgtactacggtatcccatacttgggtgttaatgcttggattgtttgcattacttacttacaacacactgatccaaaggttcctcacttcagagacaacgaatggaattttcaaagaggtgccgcttgtaccatcgatagatccttcggtactattgtcaaccacttgcaccaccacatcggcgattcccaccaatgtcaccacatgttctctcaaatgccattctacaatgctgtcgaagctactaagtatctaaaggccaagctaggtaagtactacatcttcgacgacactccaattgccaaggctttgtacagaaactggagagaatgtaaattcgtcgaagacgaaggtgatgttgttttctacaagcactaa

SEQ ID NO: 594 - DNA, 1212 bp, Artificial sequence
  Delta-15 Desaturase
atggcccctccacacgtcgtcgacgaacaagttagaagaagaatcgttgttgaagacgagattaagtcaaagaaacaattcgagagaaactacgtcccaatggatttcactatcaaggaaatcagagacgctatccctgctcacttattcatcagagacacaactaagtcaattctacacgttgtcaaagatttggttaccattgccattgttttctactgtgctaccttcatcgaaactttgccatccttggctttgagagttccagcatggatcacctactggattattcaaggtaccgtcatggttggtccatggattttggctcacgaatgtggtcacggtgccttttctcaccccaagaggttcaacaacattttcggttgggtcttgcattccgctttgttggttccttatcaggcatgggcaatgtcacactctaagcaccacaagggtactggttccatgactaaggatgttgtcttcattccagctactcgttcctacaaaggtctacctgccctagaaaagcctgctgttgaagaagaagtttctgaacaagaacatcaccaccatgaagaatccatctttgctgaaaccccaatctacactttgggtgccttgttgttcgttttaaccttcggttggccattgtacctaattgttaacttctctggtcacgaagccccacactgggtcaaccacttccaaactgttgctccattgtacgaaccacaccaaagaaagaacatcttttactctaactgtggtattgttgctatgggctctattttgacctatttgtccatggttttctctccattaactgttttcatgtactacggtatcccatacttgggtgttaatgcttggattgtttgcattacttacttacaacacactgatccaaaggttcctcacttcagagacaacgaatggaattttcaaagaggtgccgcttgtaccatcgatagatccttcggtactattgtcaaccacttgcaccaccacatcggcgattcccaccaatgtcaccacatgttctctcaaatgccattctacaatgctgtcgaagctactaagtatctaaaggccaagctaggtaagtactacatcttcgacgacactccaattgccaaggctttgtacagaaactggagagaatgtaaattcgtcgaagacgaaggtgatgttgttttctacaagcactaa

SEQ ID NO: 595 - DNA, 1212 bp, Artificial sequence
  Delta-15 Desaturase
atggcccctccacacgtcgtcgacgaacaagttagaagaagaatcgttgttgaagacgagattaagtcaaagaaacaattcgagagaaactacgtcccaatggatttcactatcaaggaaatcagagacgctatccctgctcacttattcatcagagacacaactaagtcaattctacacgttgtcaaagatttggttaccattgccattgttttctactgtgctaccttcatcgaaactttgccatccttggctttgagagttccagcatggatcacctactggattattcaaggtaccgtcatggttggtccatggattttggctcacgaatgtggtcacggtgccttttctgaatccaggtcgttcaacaccattatgggttgggtcttgcattccgctttgttggttccttatcaggcatgggcaatgtcacactctaagcaccacaagggtactggttccatgactaaggatgttgtcttcattccagctactcgttcctacaaaggtctacctgccctagaaaagcctgctgttgaagaagaagtttctgaacaagaacatcaccaccatgaagaatccatctttgctgaaaccccaatctacactttgggtgccttgttgttcgttttaaccttcggttggccattgtacctaattgttaacttctctggtcacgaagccccacactgggtcaaccacttccaaactgttgctccattgtacgaaccacaccaaagaaagaacatcttttactctaactgtggtattgttgctatgggctctattttgacctatttgtccatggttttctctccattaactgttttcatgtactacggtatcccatacttgggtgttaatgcttggattgtttgcattacttacttacaacacactgatccaaaggttcctcacttcagagacaacgaatggaattttcaaagaggtgccgcttgtaccatcgatagatccttcggtactattgtcaaccacttgcaccaccacatcggcgattcccaccaatgtcaccacatgttctctcaaatgccattctacaatgctgtcgaagctactaagtatctaaaggccaagctaggtaagtactacatcttcgacgacactccaattgccaaggctttgtacagaaactggagagaatgtaaattcgtcgaagacgaaggtgatgttgttttctacaagcactaa

SEQ ID NO: 596 - DNA, 1212 bp, Artificial sequence
  Delta-15 Desaturase
atggcccctccacacgtcgtcgacgaacaagttagaagaagaatcgttgttgaagacgagattaagtcaaagaaacaattcgagagaaactacgtcccaatggatttcactatcaaggaaatcagagacgctatccctgctcacttattcatcagagacacaactaagtcaattctacacgttgtcaaagatttggttaccattgccattgttttctactgtgctaccttcatcgaaactttgccatccttggctttgagagttccagcatggatcacctactggattattcaaggtaccgtcatggttggtccatggattttggctcacgaatgtggtcacggtgccttttctaattacacgacgatcaacaacattatcggttgggtcttgcattccgctttgttggttccttatcaggcatgggcaatgtcacactctaagcaccacaagtttactggtaatatgtcgaaggatatcgtcttcattccagctactcgttcctacaaaggtctacctgccctagaaaagcctgctgttgaagaagaagtttctgaacaagaacatcaccaccatgaagaatccatctttgctgaaaccccaatctacactttgggtgccttgttgttcgttttaaccttcggttggccattgtacctaattgttaacttctctggtcacgaagccccacactgggtcaaccacttccaaactgttgctccattgtacgaaccacaccaaagaaagaacatcttttactctaactgtggtattgttgctatgggctctattttgacctatttgtccatggttttctctccattaactgttttcatgtactacggtatcccatacttgggtgttaatgcttggattgtttgcattacttacttacaacacactgatccaaaggttcctcacttcagagacaacgaatggaattttcaaagaggtgccgcttgtaccatcgatagatccttcggtactattgtcaaccacttgcaccaccacatcggcgattcccaccaatgtcaccacatgttctctcaaatgccattctacaatgctgtcgaagctactaagtatctaaaggccaagctaggtaagtactacatcttcgacgacactccaattgccaaggctttgtacagaaactggagagaatgtaaattcgtcgaagacgaaggtgatgttgttttctacaagcactaa

SEQ ID NO: 597 - DNA, 1212 bp, Artificial sequence
  Delta-15 Desaturase
atggcccctccacacgtcgtcgacgaacaagttagaagaagaatcgttgttgaagacgagattaagtcaaagaaacaattcgagagaaactacgtcccaatggatttcactatcaaggaaatcagagacgctatccctgctcacttattcatcagagacacaactaagtcaattctacacgttgtcaaagatttggttaccattgccattgttttctactgtgctaccttcatcgaaactttgccatccttggctttgagagttccagcatggatcacctactggattattcaaggtaccgtcatggttggtccatggattttggctcacgaatgtggtcacggtgccttttctaagcccaagaggttcaacaacattatcggttgggtcttgcattccgctttgttggttccttatcaggcatgggcaatgtcacactctaagcaccacaagggtactggttccatgactaaggatgttgtcttcattccagctactcgttcctacaaaggtctacctgccctagaaaagcctgctgttgaagaagaagtttctgaacaagaacatcaccaccatgaagaatccatctttgctgaaaccccaatctacactttgggtgccttgttgttcgttttaaccttcggttggccattgtacctaattgttaacttctctggtcacgaagccccacactgggtcaaccacttccaaactgttgctccattgtacgaaccacaccaaagaaagaacatcttttactctaactgtggtattgttgctatgggctctattttgacctatttgtccatggttttctctccattaactgttttcatgtactacggtatcccatacttgggtgttaatgcttggattgtttgcattacttacttacaacacactgatccaaaggttcctcacttcagagacaacgaatggaattttcaaagaggtgccgcttgtaccatcgatagatccttcggtactattgtcaaccacttgcaccaccacatcggcgattcccaccaatgtcaccacatgttctctcaaatgccattctacaatgctgtcgaagctactaagtatctaaaggccaagctaggtaagtactacatcttcgacgacactccaattgccaaggctttgtacagaaactggagagaatgtaaattcgtcgaagacgaaggtgatgttgttttctacaagcactaa

SEQ ID NO: 598 - DNA, 1212 bp, Artificial sequence
  Delta-15 Desaturase
atggcccctccacacgtcgtcgacgaacaagttagaagaagaatcgttgttgaagacgagattaagtcaaagaaacaattcgagagaaactacgtcccaatggatttcactatcaaggaaatcagagacgctatccctgctcacttattcatcagagacacaactaagtcaattctacacgttgtcaaagatttggttaccattgccattgttttctactgtgctaccttcatcgaaactttgccatccttggctttgagagttccagcatggatcacctactggattattcaaggtaccgtcatggttggtccatggattttggctcacgaatgtggtcacggtgccttttctaatcccacgaggttcaacaacattttgggttgggtcttgcattccgctttgttggttccttatcaggcatgggcaatgtcacactctaagcaccacaagggtactggttccatgactaaggatgttgtcttcattccagctactcgttcctacaaaggtctacctgccctagaaaagcctgctgttgaagaagaagtttctgaacaagaacatcaccaccatgaagaatccatctttgctgaaaccccaatctacactttgggtgccttgttgttcgttttaaccttcggttggccattgtacctaattgttaacttctctggtcacgaagccccacactgggtcaaccacttccaaactgttgctccattgtacgaaccacaccaaagaaagaacatcttttactctaactgtggtattgttgctatgggctctattttgacctatttgtccatggttttctctccattaactgttttcatgtactacggtatcccatacttgggtgttaatgcttggattgtttgcattacttacttacaacacactgatccaaaggttcctcacttcagagacaacgaatggaattttcaaagaggtgccgcttgtaccatcgatagatccttcggtactattgtcaaccacttgcaccaccacatcggcgattcccaccaatgtcaccacatgttctctcaaatgccattctacaatgctgtcgaagctactaagtatctaaaggccaagctaggtaagtactacatcttcgacgacactccaattgccaaggctttgtacagaaactggagagaatgtaaattcgtcgaagacgaaggtgatgttgttttctacaagcactaa

SEQ ID NO: 599 - DNA, 1212 bp, Artificial sequence
  Delta-15 Desaturase
atggcccctccacacgtcgtcgacgaacaagttagaagaagaatcgttgttgaagacgagattaagtcaaagaaacaattcgagagaaactacgtcccaatggatttcactatcaaggaaatcagagacgctatccctgctcacttattcatcagagacacaactaagtcaattctacacgttgtcaaagatttggttaccattgccattgttttctactgtgctaccttcatcgaaactttgccatccttggctttgagagttccagcatggatcacctactggattattcaaggtaccgtcatggttggtccatggattttggctcacgaatgtggtcacggtgccttttctgaatacacgtcgttcaacaacattttcggttgggtcttgcattccgctttgttggttccttatcaggcatgggcaatgtcacactctaagcaccacaagggtactggttccatgactaaggatgttgtcttcattccagctactcgttcctacaaaggtctacctgccctagaaaagcctgctgttgaagaagaagtttctgaacaagaacatcaccaccatgaagaatccatctttgctgaaaccccaatctacactttgggtgccttgttgttcgttttaaccttcggttggccattgtacctaattgttaacttctctggtcacgaagccccacactgggtcaaccacttccaaactgttgctccattgtacgaaccacaccaaagaaagaacatcttttactctaactgtggtattgttgctatgggctctattttgacctatttgtccatggttttctctccattaactgttttcatgtactacggtatcccatacttgggtgttaatgcttggattgtttgcattacttacttacaacacactgatccaaaggttcctcacttcagagacaacgaatggaattttcaaagaggtgccgcttgtaccatcgatagatccttcggtactattgtcaaccacttgcaccaccacatcggcgattcccaccaatgtcaccacatgttctctcaaatgccattctacaatgctgtcgaagctactaagtatctaaaggccaagctaggtaagtactacatcttcgacgacactccaattgccaaggctttgtacagaaactggagagaatgtaaattcgtcgaagacgaaggtgatgttgttttctacaagcactaa

SEQ ID NO: 600 - DNA, 1212 bp, Artificial sequence
  Delta-15 Desaturase
atggcccctccacacgtcgtcgacgaacaagttagaagaagaatcgttgttgaagacgagattaagtcaaagaaacaattcgagagaaactacgtcccaatggatttcactatcaaggaaatcagagacgctatccctgctcacttattcatcagagacacaactaagtcaattctacacgttgtcaaagatttggttaccattgccattgttttctactgtgctaccttcatcgaaactttgccatccttggctttgagagttccagcatggatcacctactggattattcaaggtaccgtcatggttggtccatggattttggctcacgaatgtggtcacggtgccttttctaagtacaggacgttcaacaccattatcggttgggtcttgcattccgctttgttggttccttatcaggcatgggcaatgtcacactctaagcaccacaagggtactggttccatgactaaggatgttgtcttcattccagctactcgttcctacaaaggtctacctgccctagaaaagcctgctgttgaagaagaagtttctgaacaagaacatcaccaccatgaagaatccatctttgctgaaaccccaatctacactttgggtgccttgttgttcgttttaaccttcggttggccattgtacctaattgttaacttctctggtcacgaagccccacactgggtcaaccacttccaaactgttgctccattgtacgaaccacaccaaagaaagaacatcttttactctaactgtggtattgttgctatgggctctattttgacctatttgtccatggttttctctccattaactgttttcatgtactacggtatcccatacttgggtgttaatgcttggattgtttgcattacttacttacaacacactgatccaaaggttcctcacttcagagacaacgaatggaattttcaaagaggtgccgcttgtaccatcgatagatccttcggtactattgtcaaccacttgcaccaccacatcggcgattcccaccaatgtcaccacatgttctctcaaatgccattctacaatgctgtcgaagctactaagtatctaaaggccaagctaggtaagtactacatcttcgacgacactccaattgccaaggctttgtacagaaactggagagaatgtaaattcgtcgaagacgaaggtgatgttgttttctacaagcactaa

SEQ ID NO: 601 - DNA, 1212 bp, Artificial sequence
  Delta-15 Desaturase
atggcccctccacacgtcgtcgacgaacaagttagaagaagaatcgttgttgaagacgagattaagtcaaagaaacaattcgagagaaactacgtcccaatggatttcactatcaaggaaatcagagacgctatccctgctcacttattcatcagagacacaactaagtcaattctacacgttgtcaaagatttggttaccattgccattgttttctactgtgctaccttcatcgaaactttgccatccttggctttgagagttccagcatggatcacctactggattattcaaggtaccgtcatggttggtccatggattttggctcacgaatgtggtcacggtgccttttctaagtacaggtggttcaacaccattatcggttgggtcttgcattccgctttgttggttccttatcaggcatgggcaatgtcacactctaagcaccacaagggtactggttccatgactaaggatgttgtcttcattccagctactcgttcctacaaaggtctacctgccctagaaaagcctgctgttgaagaagaagtttctgaacaagaacatcaccaccatgaagaatccatctttgctgaaaccccaatctacactttgggtgccttgttgttcgttttaaccttcggttggccattgtacctaattgttaacttctctggtcacgaagccccacactgggtcaaccacttccaaactgttgctccattgtacgaaccacaccaaagaaagaacatcttttactctaactgtggtattgttgctatgggctctattttgacctatttgtccatggttttctctccattaactgttttcatgtactacggtatcccatacttgggtgttaatgcttggattgtttgcattacttacttacaacacactgatccaaaggttcctcacttcagagacaacgaatggaattttcaaagaggtgccgcttgtaccatcgatagatccttcggtactattgtcaaccacttgcaccaccacatcggcgattcccaccaatgtcaccacatgttctctcaaatgccattctacaatgctgtcgaagctactaagtatctaaaggccaagctaggtaagtactacatcttcgacgacactccaattgccaaggctttgtacagaaactggagagaatgtaaattcgtcgaagacgaaggtgatgttgttttctacaagcactaa

SEQ ID NO: 602 - DNA, 1212 bp, Artificial sequence
  Delta-15 Desaturase
atggcccctccacacgtcgtcgacgaacaagttagaagaagaatcgttgttgaagacgagattaagtcaaagaaacaattcgagagaaactacgtcccaatggatttcactatcaaggaaatcagagacgctatccctgctcacttattcatcagagacacaactaagtcaattctacacgttgtcaaagatttggttaccattgccattgttttctactgtgctaccttcatcgaaactttgccatccttggctttgagagttccagcatggatcacctactggattattcaaggtaccgtcatggttggtccatggattttggctcacgaatgtggtcacggtgccttttctcaacccacgacgatcaactacattttgggttgggtcttgcattccgctttgttggttccttatcaggcatgggcaatgtcacactctaagcaccacaaggatactggtaatatggcgaaggatttggtcttcattccagctactcgttcctacaaaggtctacctgccctagaaaagcctgctgttgaagaagaagtttctgaacaagaacatcaccaccatgaagaatccatctttgctgaaaccccaatctacactttgggtgccttgttgttcgttttaaccttcggttggccattgtacctaattgttaacttctctggtcacgaagccccacactgggtcaaccacttccaaactgttgctccattgtacgaaccacaccaaagaaagaacatcttttactctaactgtggtattgttgctatgggctctattttgacctatttgtccatggttttctctccattaactgttttcatgtactacggtatcccatacttgggtgttaatgcttggattgtttgcattacttacttacaacacactgatccaaaggttcctcacttcagagacaacgaatggaattttcaaagaggtgccgcttgtaccatcgatagatccttcggtactattgtcaaccacttgcaccaccacatcggcgattcccaccaatgtcaccacatgttctctcaaatgccattctacaatgctgtcgaagctactaagtatctaaaggccaagctaggtaagtactacatcttcgacgacactccaattgccaaggctttgtacagaaactggagagaatgtaaattcgtcgaagacgaaggtgatgttgttttctacaagcactaa

SEQ ID NO: 603 - DNA, 1212 bp, Artificial sequence
  Delta-15 Desaturase
atggcccctccacacgtcgtcgacgaacaagttagaagaagaatcgttgttgaagacgagattaagtcaaagaaacaattcgagagaaactacgtcccaatggatttcactatcaaggaaatcagagacgctatccctgctcacttattcatcagagacacaactaagtcaattctacacgttgtcaaagatttggttaccattgccattgttttctactgtgctaccttcatcgaaactttgccatccttggctttgagagttccagcatggatcacctactggattattcaaggtaccgtcatggttggtccatggattttggctcacgaatgtggtcacggtgccttttctgaatacacgtcgatcaactacattttgggttgggtcttgcattccgctttgttggttccttatcaggcatgggcaatgtcacactctaagcaccacaagggtactggtactatgtcgaaggatgtcgtcttcattccagctactcgttcctacaaaggtctacctgccctagaaaagcctgctgttgaagaagaagtttctgaacaagaacatcaccaccatgaagaatccatctttgctgaaaccccaatctacactttgggtgccttgttgttcgttttaaccttcggttggccattgtacctaattgttaacttctctggtcacgaagccccacactgggtcaaccacttccaaactgttgctccattgtacgaaccacaccaaagaaagaacatcttttactctaactgtggtattgttgctatgggctctattttgacctatttgtccatggttttctctccattaactgttttcatgtactacggtatcccatacttgggtgttaatgcttggattgtttgcattacttacttacaacacactgatccaaaggttcctcacttcagagacaacgaatggaattttcaaagaggtgccgcttgtaccatcgatagatccttcggtactattgtcaaccacttgcaccaccacatcggcgattcccaccaatgtcaccacatgttctctcaaatgccattctacaatgctgtcgaagctactaagtatctaaaggccaagctaggtaagtactacatcttcgacgacactccaattgccaaggctttgtacagaaactggagagaatgtaaattcgtcgaagacgaaggtgatgttgttttctacaagcactaa

SEQ ID NO: 604 - DNA, 1212 bp, Artificial sequence
  Delta-15 Desaturase
atggcccctccacacgtcgtcgacgaacaagttagaagaagaatcgttgttgaagacgagattaagtcaaagaaacaattcgagagaaactacgtcccaatggatttcactatcaaggaaatcagagacgctatccctgctcacttattcatcagagacacaactaagtcaattctacacgttgtcaaagatttggttaccattgccattgttttctactgtgctaccttcatcgaaactttgccatccttggctttgagagttccagcatggatcacctactggattattcaaggtaccgtcatggttggtccatggattttggctcacgaatgtggtcacggtgccttttctcaacacaagaggatcaactacattttcggttgggtcttgcattccgctttgttggttccttatcaggcatgggcaatgtcacactctaagcaccacaaggctactggtaatatgaagaaggatgtggtcttcattccagctactcgttcctacaaaggtctacctgccctagaaaagcctgctgttgaagaagaagtttctgaacaagaacatcaccaccatgaagaatccatctttgctgaaaccccaatctacactttgggtgccttgttgttcgttttaaccttcggttggccattgtacctaattgttaacttctctggtcacgaagccccacactgggtcaaccacttccaaactgttgctccattgtacgaaccacaccaaagaaagaacatcttttactctaactgtggtattgttgctatgggctctattttgacctatttgtccatggttttctctccattaactgttttcatgtactacggtatcccatacttgggtgttaatgcttggattgtttgcattacttacttacaacacactgatccaaaggttcctcacttcagagacaacgaatggaattttcaaagaggtgccgcttgtaccatcgatagatccttcggtactattgtcaaccacttgcaccaccacatcggcgattcccaccaatgtcaccacatgttctctcaaatgccattctacaatgctgtcgaagctactaagtatctaaaggccaagctaggtaagtactacatcttcgacgacactccaattgccaaggctttgtacagaaactggagagaatgtaaattcgtcgaagacgaaggtgatgttgttttctacaagcactaa

SEQ ID NO: 605 - DNA, 1212 bp, Artificial sequence
  Delta-15 Desaturase
atggcccctccacacgtcgtcgacgaacaagttagaagaagaatcgttgttgaagacgagattaagtcaaagaaacaattcgagagaaactacgtcccaatggatttcactatcaaggaaatcagagacgctatccctgctcacttattcatcagagacacaactaagtcaattctacacgttgtcaaagatttggttaccattgccattgttttctactgtgctaccttcatcgaaactttgccatccttggctttgagagttccagcatggatcacctactggattattcaaggtaccgtcatggttggtccatggattttggctcacgaatgtggtcacggtgccttttctgattccaagactatcaacactattttcggttgggtcttgcattccgctttgttggttccttatcaggcatgggcaatgtcacactctaagcaccacaagggtactggttccatgactaaggatgttgtcttcattccagctactaaatgggtcggagatctcccaaccctagaaaagcctgctgttgaagaagaagtttctgaacaagaacatcaccaccatgaagaatccatctttgctgaaaccccaatctacactttgggtgccttgttgttcgttttaaccttcggttggccattgtacctaattgttaacttctctggtcacgaagccccacactgggtcaaccacttccaaactgttgctccattgtacgaaccacaccaaagaaagaacatcttttactctaactgtggtattgttgctatgggctctattttgacctatttgtccatggttttctctccattaactgttttcatgtactacggtatcccatacttgggtgttaatgcttggattgtttgcattacttacttacaacacactgatccaaaggttcctcacttcagagacaacgaatggaattttcaaagaggtgccgcttgtaccatcgatagatccttcggtactattgtcaaccacttgcaccaccacatcggcgattcccaccaatgtcaccacatgttctctcaaatgccattctacaatgctgtcgaagctactaagtatctaaaggccaagctaggtaagtactacatcttcgacgacactccaattgccaaggctttgtacagaaactggagagaatgtaaattcgtcgaagacgaaggtgatgttgttttctacaagcactaa

SEQ ID NO: 606 - DNA, 1212 bp, Artificial sequence
  Delta-15 Desaturase
atggcccctccacacgtcgtcgacgaacaagttagaagaagaatcgttgttgaagacgagattaagtcaaagaaacaattcgagagaaactacgtcccaatggatttcactatcaaggaaatcagagacgctatccctgctcacttattcatcagagacacaactaagtcaattctacacgttgtcaaagatttggttaccattgccattgttttctactgtgctaccttcatcgaaactttgccatccttggctttgagagttccagcatggatcacctactggattattcaaggtaccgtcatggttggtccatggattttggctcacgaatgtggtcacggtgccttttctgattccaagactatcaacactattttcggttgggtcttgcattccgctttgttggttccttatcaggcatgggcaatgtcacactctaagcaccacaagggtactggttccatgactaaggatgttgtcttcattccagctactggagcgtacggagatgcccgagccctagaaaagcctgctgttgaagaagaagtttctgaacaagaacatcaccaccatgaagaatccatctttgctgaaaccccaatctacactttgggtgccttgttgttcgttttaaccttcggttggccattgtacctaattgttaacttctctggtcacgaagccccacactgggtcaaccacttccaaactgttgctccattgtacgaaccacaccaaagaaagaacatcttttactctaactgtggtattgttgctatgggctctattttgacctatttgtccatggttttctctccattaactgttttcatgtactacggtatcccatacttgggtgttaatgcttggattgtttgcattacttacttacaacacactgatccaaaggttcctcacttcagagacaacgaatggaattttcaaagaggtgccgcttgtaccatcgatagatccttcggtactattgtcaaccacttgcaccaccacatcggcgattcccaccaatgtcaccacatgttctctcaaatgccattctacaatgctgtcgaagctactaagtatctaaaggccaagctaggtaagtactacatcttcgacgacactccaattgccaaggctttgtacagaaactggagagaatgtaaattcgtcgaagacgaaggtgatgttgttttctacaagcactaa

SEQ ID NO: 607 - DNA, 1212 bp, Artificial sequence
  Delta-15 Desaturase
atggcccctccacacgtcgtcgacgaacaagttagaagaagaatcgttgttgaagacgagattaagtcaaagaaacaattcgagagaaactacgtcccaatggatttcactatcaaggaaatcagagacgctatccctgctcacttattcatcagagacacaactaagtcaattctacacgttgtcaaagatttggttaccattgccattgttttctactgtgctaccttcatcgaaactttgccatccttggctttgagagttccagcatggatcacctactggattattcaaggtaccgtcatggttggtccatggattttggctcacgaatgtggtcacggtgccttttctgattccaagactatcaacactattttcggttgggtcttgcattccgctttgttggttccttatcaggcatgggcaatgtcacactctaagcaccacaagggtactggttccatgactaaggatgttgtcttcattccagctactggtaggctcgaagatctcccagacctagaaaagcctgctgttgaagaagaagtttctgaacaagaacatcaccaccatgaagaatccatctttgctgaaaccccaatctacactttgggtgccttgttgttcgttttaaccttcggttggccattgtacctaattgttaacttctctggtcacgaagccccacactgggtcaaccacttccaaactgttgctccattgtacgaaccacaccaaagaaagaacatcttttactctaactgtggtattgttgctatgggctctattttgacctatttgtccatggttttctctccattaactgttttcatgtactacggtatcccatacttgggtgttaatgcttggattgtttgcattacttacttacaacacactgatccaaaggttcctcacttcagagacaacgaatggaattttcaaagaggtgccgcttgtaccatcgatagatccttcggtactattgtcaaccacttgcaccaccacatcggcgattcccaccaatgtcaccacatgttctctcaaatgccattctacaatgctgtcgaagctactaagtatctaaaggccaagctaggtaagtactacatcttcgacgacactccaattgccaaggctttgtacagaaactggagagaatgtaaattcgtcgaagacgaaggtgatgttgttttctacaagcactaa

SEQ ID NO: 608 - DNA, 1212 bp, Artificial sequence
  Delta-15 Desaturase
atggcccctccacacgtcgtcgacgaacaagttagaagaagaatcgttgttgaagacgagattaagtcaaagaaacaattcgagagaaactacgtcccaatggatttcactatcaaggaaatcagagacgctatccctgctcacttattcatcagagacacaactaagtcaattctacacgttgtcaaagatttggttaccattgccattgttttctactgtgctaccttcatcgaaactttgccatccttggctttgagagttccagcatggatcacctactggattattcaaggtaccgtcatggttggtccatggattttggctcacgaatgtggtcacggtgccttttctgattccaagactatcaacactattttcggttgggtcttgcattccgctttgttggttccttatcaggcatgggcaatgtcacactctaagcaccacaagggtactggttccatgactaaggatgttgtcttcattccagctactggatggctcagaggtatcccaaacctagaaaagcctgctgttgaagaagaagtttctgaacaagaacatcaccaccatgaagaatccatctttgctgaaaccccaatctacactttgggtgccttgttgttcgttttaaccttcggttggccattgtacctaattgttaacttctctggtcacgaagccccacactgggtcaaccacttccaaactgttgctccattgtacgaaccacaccaaagaaagaacatcttttactctaactgtggtattgttgctatgggctctattttgacctatttgtccatggttttctctccattaactgttttcatgtactacggtatcccatacttgggtgttaatgcttggattgtttgcattacttacttacaacacactgatccaaaggttcctcacttcagagacaacgaatggaattttcaaagaggtgccgcttgtaccatcgatagatccttcggtactattgtcaaccacttgcaccaccacatcggcgattcccaccaatgtcaccacatgttctctcaaatgccattctacaatgctgtcgaagctactaagtatctaaaggccaagctaggtaagtactacatcttcgacgacactccaattgccaaggctttgtacagaaactggagagaatgtaaattcgtcgaagacgaaggtgatgttgttttctacaagcactaa

SEQ ID NO: 609 - DNA, 1212 bp, Artificial sequence
  Delta-15 Desaturase
atggcccctccacacgtcgtcgacgaacaagttagaagaagaatcgttgttgaagacgagattaagtcaaagaaacaattcgagagaaactacgtcccaatggatttcactatcaaggaaatcagagacgctatccctgctcacttattcatcagagacacaactaagtcaattctacacgttgtcaaagatttggttaccattgccattgttttctactgtgctaccttcatcgaaactttgccatccttggctttgagagttccagcatggatcacctactggattattcaaggtaccgtcatggttggtccatggattttggctcacgaatgtggtcacggtgccttttctaagcacaggaggttcaacaccattttcggttgggtcttgcattccgctttgttggttccttatcaggcatgggcaatgtcacactctaagcaccacaagtatactggtgatatgaagaaggatttggtcttcattccagctactcgttcctacaaaggtctacctgccctagaaaagcctgctgttgaagaagaagtttctgaacaagaacatcaccaccatgaagaatccatctttgctgaaaccccaatctacactttgggtgccttgttgttcgttttaaccttcggttggccattgtacctaattgttaacttctctggtcacgaagccccacactgggtcaaccacttccaaactgttgctccattgtacgaaccacaccaaagaaagaacatcttttactctaactgtggtattgttgctatgggctctattttgacctatttgtccatggttttctctccattaactgttttcatgtactacggtatcccatacttgggtgttaatgcttggattgtttgcattacttacttacaacacactgatccaaaggttcctcacttcagagacaacgaatggaattttcaaagaggtgccgcttgtaccatcgatagatccttcggtactattgtcaaccacttgcaccaccacatcggcgattcccaccaatgtcaccacatgttctctcaaatgccattctacaatgctgtcgaagctactaagtatctaaaggccaagctaggtaagtactacatcttcgacgacactccaattgccaaggctttgtacagaaactggagagaatgtaaattcgtcgaagacgaaggtgatgttgttttctacaagcactaa

SEQ ID NO: 610 - DNA, 1212 bp, Artificial sequence
  Delta-15 Desaturase
atggcccctccacacgtcgtcgacgaacaagttagaagaagaatcgttgttgaagacgagattaagtcaaagaaacaattcgagagaaactacgtcccaatggatttcactatcaaggaaatcagagacgctatccctgctcacttattcatcagagacacaactaagtcaattctacacgttgtcaaagatttggttaccattgccattgttttctactgtgctaccttcatcgaaactttgccatccttggctttgagagttccagcatggatcacctactggattattcaaggtaccgtcatggttggtccatggattttggctcacgaatgtggtcacggtgccttttctgattccaagactatcaacactattttcggttgggtcttgcattccgctttgttggttccttatcaggcatgggcaatgtcacactctaagcaccacaagggtactggttccatgactaaggatgttgtcttcattccagctactgaaacggacagaagtctccgaaacctagaaaagcctgctgttgaagaagaagtttctgaacaagaacatcaccaccatgaagaatccatctttgctgaaaccccaatctacactttgggtgccttgttgttcgttttaaccttcggttggccattgtacctaattgttaacttctctggtcacgaagccccacactgggtcaaccacttccaaactgttgctccattgtacgaaccacaccaaagaaagaacatcttttactctaactgtggtattgttgctatgggctctattttgacctatttgtccatggttttctctccattaactgttttcatgtactacggtatcccatacttgggtgttaatgcttggattgtttgcattacttacttacaacacactgatccaaaggttcctcacttcagagacaacgaatggaattttcaaagaggtgccgcttgtaccatcgatagatccttcggtactattgtcaaccacttgcaccaccacatcggcgattcccaccaatgtcaccacatgttctctcaaatgccattctacaatgctgtcgaagctactaagtatctaaaggccaagctaggtaagtactacatcttcgacgacactccaattgccaaggctttgtacagaaactggagagaatgtaaattcgtcgaagacgaaggtgatgttgttttctacaagcactaa

SEQ ID NO: 611 - DNA, 1212 bp, Artificial sequence
  Delta-15 Desaturase
atggcccctccacacgtcgtcgacgaacaagttagaagaagaatcgttgttgaagacgagattaagtcaaagaaacaattcgagagaaactacgtcccaatggatttcactatcaaggaaatcagagacgctatccctgctcacttattcatcagagacacaactaagtcaattctacacgttgtcaaagatttggttaccattgccattgttttctactgtgctaccttcatcgaaactttgccatccttggctttgagagttccagcatggatcacctactggattattcaaggtaccgtcatggttggtccatggattttggctcacgaatgtggtcacggtgccttttctgattccaagactatcaacactattttcggttgggtcttgcattccgctttgttggttccttatcaggcatgggcaatgtcacactctaagcaccacaagggtactggttccatgactaaggatgttgtcttcattccagctactggtgcgctcggaaatcccccaaacctagaaaagcctgctgttgaagaagaagtttctgaacaagaacatcaccaccatgaagaatccatctttgctgaaaccccaatctacactttgggtgccttgttgttcgttttaaccttcggttggccattgtacctaattgttaacttctctggtcacgaagccccacactgggtcaaccacttccaaactgttgctccattgtacgaaccacaccaaagaaagaacatcttttactctaactgtggtattgttgctatgggctctattttgacctatttgtccatggttttctctccattaactgttttcatgtactacggtatcccatacttgggtgttaatgcttggattgtttgcattacttacttacaacacactgatccaaaggttcctcacttcagagacaacgaatggaattttcaaagaggtgccgcttgtaccatcgatagatccttcggtactattgtcaaccacttgcaccaccacatcggcgattcccaccaatgtcaccacatgttctctcaaatgccattctacaatgctgtcgaagctactaagtatctaaaggccaagctaggtaagtactacatcttcgacgacactccaattgccaaggctttgtacagaaactggagagaatgtaaattcgtcgaagacgaaggtgatgttgttttctacaagcactaa

SEQ ID NO: 612 - DNA, 1212 bp, Artificial sequence
  Delta-15 Desaturase
atggcccctccacacgtcgtcgacgaacaagttagaagaagaatcgttgttgaagacgagattaagtcaaagaaacaattcgagagaaactacgtcccaatggatttcactatcaaggaaatcagagacgctatccctgctcacttattcatcagagacacaactaagtcaattctacacgttgtcaaagatttggttaccattgccattgttttctactgtgctaccttcatcgaaactttgccatccttggctttgagagttccagcatggatcacctactggattattcaaggtaccgtcatggttggtccatggattttggctcacgaatgtggtcacggtgccttttctgattccaagactatcaacactattttcggttgggtcttgcattccgctttgttggttccttatcaggcatgggcaatgtcacactctaagcaccacaagggtactggttccatgactaaggatgttgtcttcattccagctactgatacgctcggaagtgtccgaaacctagaaaagcctgctgttgaagaagaagtttctgaacaagaacatcaccaccatgaagaatccatctttgctgaaaccccaatctacactttgggtgccttgttgttcgttttaaccttcggttggccattgtacctaattgttaacttctctggtcacgaagccccacactgggtcaaccacttccaaactgttgctccattgtacgaaccacaccaaagaaagaacatcttttactctaactgtggtattgttgctatgggctctattttgacctatttgtccatggttttctctccattaactgttttcatgtactacggtatcccatacttgggtgttaatgcttggattgtttgcattacttacttacaacacactgatccaaaggttcctcacttcagagacaacgaatggaattttcaaagaggtgccgcttgtaccatcgatagatccttcggtactattgtcaaccacttgcaccaccacatcggcgattcccaccaatgtcaccacatgttctctcaaatgccattctacaatgctgtcgaagctactaagtatctaaaggccaagctaggtaagtactacatcttcgacgacactccaattgccaaggctttgtacagaaactggagagaatgtaaattcgtcgaagacgaaggtgatgttgttttctacaagcactaa

SEQ ID NO: 613 - DNA, 1212 bp, Artificial sequence
  Delta-15 Desaturase
atggcccctccacacgtcgtcgacgaacaagttagaagaagaatcgttgttgaagacgagattaagtcaaagaaacaattcgagagaaactacgtcccaatggatttcactatcaaggaaatcagagacgctatccctgctcacttattcatcagagacacaactaagtcaattctacacgttgtcaaagatttggttaccattgccattgttttctactgtgctaccttcatcgaaactttgccatccttggctttgagagttccagcatggatcacctactggattattcaaggtaccgtcatggttggtccatggattttggctcacgaatgtggtcacggtgccttttctaaacacacgacgttcaacaacattttcggttgggtcttgcattccgctttgttggttccttatcaggcatgggcaatgtcacactctaagcaccacaagtatactggtcatatgtcgaaggatttggtcttcattccagctactcgttcctacaaaggtctacctgccctagaaaagcctgctgttgaagaagaagtttctgaacaagaacatcaccaccatgaagaatccatctttgctgaaaccccaatctacactttgggtgccttgttgttcgttttaaccttcggttggccattgtacctaattgttaacttctctggtcacgaagccccacactgggtcaaccacttccaaactgttgctccattgtacgaaccacaccaaagaaagaacatcttttactctaactgtggtattgttgctatgggctctattttgacctatttgtccatggttttctctccattaactgttttcatgtactacggtatcccatacttgggtgttaatgcttggattgtttgcattacttacttacaacacactgatccaaaggttcctcacttcagagacaacgaatggaattttcaaagaggtgccgcttgtaccatcgatagatccttcggtactattgtcaaccacttgcaccaccacatcggcgattcccaccaatgtcaccacatgttctctcaaatgccattctacaatgctgtcgaagctactaagtatctaaaggccaagctaggtaagtactacatcttggacgacactccaattgccaaggctttgtacagaaactggagagaatgtaaattcgtcgaagacgaaggtgatgttgttttctacaagcactaa

SEQ ID NO: 614 - DNA, 1212 bp, Artificial sequence
  Delta-15 Desaturase
atggcccctccacacgtcgtcgacgaacaagttagaagaagaatcgttgttgaagacgagattaagtcaaagaaacaattcgagagaaactacgtcccaatggatttcactatcaaggaaatcagagacgctatccctgctcacttattcatcagagacacaactaagtcaattctacacgttgtcaaagatttggttaccattgccattgttttctactgtgctaccttcatcgaaactttgccatccttggctttgagagttccagcatggatcacctactggattattcaaggtaccgtcatggttggtccatggattttggctcacgaatgtggtcacggtgccttttctaaacccacgacgatcaacaccattttgggttgggtcttgcattccgctttgttggttccttatcaggcatgggcaatgtcacactctaagcaccacaagggtactggttccatgactaaggatgttgtcttcattccagctactcgttcctacaaaggtctacctgccctagaaaagcctgctgttgaagaagaagtttctgaacaagaacatcaccaccatgaagaatccatctttgctgaaaccccaatctacactttgggtgccttgttgttcgttttaaccttcggttggccattgtacctaattgttaacttctctggtcacgaagccccacactgggtcaaccacttccaaactgttgctccattgtacgaaccacaccaaagaaagaacatcttttactctaactgtggtattgttgctatgggctctattttgacctatttgtccatggttttctctccattaactgttttcatgtactacggtatcccatacttgggtgttaatgcttggattgtttgcattacttacttacaacacactgatccaaaggttcctcacttcagagacaacgaatggaattttcaaagaggtgccgcttgtaccatcgatagatccttcggtactattgtcaaccacttgcaccaccacatcggcgattcccaccaatgtcaccacatgttctctcaaatgccattctacaatgctgtcgaagctactaagtatctaaaggccaagctaggtaagtactacatcttcgacgacactccaattgccaaggctttgtacagaaactggagagaatgtaaattcgtcgaagacgaaggtgatgttgttttctacaagcactaa

SEQ ID NO: 615 - DNA, 1212 bp, Artificial sequence
  Delta-15 Desaturase
atggcccctccacacgtcgtcgacgaacaagttagaagaagaatcgttgttgaagacgagattaagtcaaagaaacaattcgagagaaactacgtcccaatggatttcactatcaaggaaatcagagacgctatccctgctcacttattcatcagagacacaactaagtcaattctacacgttgtcaaagatttggttaccattgccattgttttctactgtgctaccttcatcgaaactttgccatccttggctttgagagttccagcatggatcacctactggattattcaaggtaccgtcatggttggtccatggattttggctcacgaatgtggtcacggtgccttttctgaatccaggaggttcaactccattttgggttgggtcttgcattccgctttgttggttccttatcaggcatgggcaatgtcacactctaagcaccacaagtatactggtgctatgtcgaaggatgtcgtcttcattccagctactcgttcctacaaaggtctacctgccctagaaaagcctgctgttgaagaagaagtttctgaacaagaacatcaccaccatgaagaatccatctttgctgaaaccccaatctacactttgggtgccttgttgttcgttttaaccttcggttggccattgtacctaattgttaacttctctggtcacgaagccccacactgggtcaaccacttccaaactgttgctccattgtacgaaccacaccaaagaaagaacatcttttactctaactgtggtattgttgctatgggctctattttgacctatttgtccatggttttctctccattaactgttttcatgtactacggtatcccatacttgggtgttaatgcttggattgtttgcattacttacttacaacacactgatccaaaggttcctcacttcagagacaacgaatggaattttcaaagaggtgccgcttgtaccatcgatagatccttcggtactattgtcaaccacttgcaccaccacatcggcgattcccaccaatgtcaccacatgttctctcaaatgccattctacaatgctgtcgaagctactaagtatctaaaggccaagctaggtaagtactacatcttcgacgacactccaattgccaaggctttgtacagaaactggagagaatgtaaattcgtcgaagacgaaggtgatgttgttttctacaagcactaa

SEQ ID NO: 616 - DNA, 1212 bp, Artificial sequence
  Delta-15 Desaturase
atggcccctccacacgtcgtcgacgaacaagttagaagaagaatcgttgttgaagacgagattaagtcaaagaaacaattcgagagaaactacgtcccaatggatttcactatcaaggaaatcagagacgctatccctgctcacttattcatcagagacacaactaagtcaattctacacgttgtcaaagatttggttaccattgccattgttttctactgtgctaccttcatcgaaactttgccatccttggctttgagagttccagcatggatcacctactggattattcaaggtaccgtcatggttggtccatggattttggctcacgaatgtggtcacggtgccttttctgattccaagactatcaacactattttcggttgggtcttgcattccgctttgttggttccttatcaggcatgggcaatgtcacactctaagcaccacaaggctactggtaatatggcgaaggatatggtcttcattccagctactcgttcctacaaaggtctacctgccctagaaaagcctgctgttgaagaagaagtttctgaacaagaacatcaccaccatgaagaatccatctttgctgaaaccccaatctacactttgggtgccttgttgttcgttttaaccttcggttggccattgtacctaattgttaacttctctggtcacgaagccccacactgggtcaaccacttccaaactgttgctccattgtacgaaccacaccaaagaaagaacatcttttactctaactgtggtattgttgctatgggctctattttgacctatttgtccatggttttctctccattaactgttttcatgtactacggtatcccatacttgggtgttaatgcttggattgtttgcattacttacttacaacacactgatccaaaggttcctcacttcagagacaacgaatggaattttcaaagaggtgccgcttgtaccatcgatagatccttcggtactattgtcaaccacttgcaccaccacatcggcgattcccaccaatgtcaccacatgttctctcaaatgccattctacaatgctgtcgaagctactaagtatctaaaggccaagctaggtaagtactacatcttcgacgacactccaattgccaaggctttgtacagaaactggagagaatgtaaattcgtcgaagacgaaggtgatgttgttttctacaagcactaa

SEQ ID NO: 617 - DNA, 1212 bp, Artificial sequence
  Delta-15 Desaturase
atggcccctccacacgtcgtcgacgaacaagttagaagaagaatcgttgttgaagacgagattaagtcaaagaaacaattcgagagaaactacgtcccaatggatttcactatcaaggaaatcagagacgctatccctgctcacttattcatcagagacacaactaagtcaattctacacgttgtcaaagatttggttaccattgccattgttttctactgtgctaccttcatcgaaactttgccatccttggctttgagagttccagcatggatcacctactggattattcaaggtaccgtcatggttggtccatggattttggctcacgaatgtggtcacggtgccttttctgattccaagactatcaacactattttcggttgggtcttgcattccgctttgttggttccttatcaggcatgggcaatgtcacactctaagcaccacaagggtactggttccatgactaaggatgttgtcttcattccagctactcgttcctacaaaggtctacctgccctagaaaagcctgctgttgaagaagaagtttctgaacaagaacatcaccaccatgaagaatccatctttgctgaaaacccaatctacattttgatcacgttcatcgtcgtcctgaccttcggttggccattgtacctaattgttaacttctctggtcacgaagccccacactgggtcaaccacttccaaactgttgctccattgtacgaaccacaccaaagaaagaacatcttttactctaactgtggtattgttgctatgggctctattttgacctatttgtccatggttttctctccattaactgttttcatgtactacggtatcccatacttgggtgttaatgcttggattgtttgcattacttacttacaacacactgatccaaaggttcctcacttcagagacaacgaatggaattttcaaagaggtgccgcttgtaccatcgatagatccttcggtactattgtcaaccacttgcaccaccacatcggcgattcccaccaatgtcaccacatgttctctcaaatgccattctacaatgctgtcgaagctactaagtatctaaaggccaagctaggtaagtactacatcttcgacgacactccaattgccaaggctttgtacagaaactggagagaatgtaaattcgtcgaagacgaaggtgatgttgttttctacaagcactaa

SEQ ID NO: 618 - DNA, 1212 bp, Artificial sequence
  Delta-15 Desaturase
atggcccctccacacgtcgtcgacgaacaagttagaagaagaatcgttgttgaagacgagattaagtcaaagaaacaattcgagagaaactacgtcccaatggatttcactatcaaggaaatcagagacgctatccctgctcacttattcatcagagacacaactaagtcaattctacacgttgtcaaagatttggttaccattgccattgttttctactgtgctaccttcatcgaaactttgccatccttggctttgagagttccagcatggatcacctactggattattcaaggtaccgtcatggttggtccatggattttggctcacgaatgtggtcacggtgccttttctgattccaagactatcaacactattttcggttgggtcttgcattccgctttgttggttccttatcaggcatgggcaatgtcacactctaagcaccacaagggtactggttccatgactaaggatgttgtcttcattccagctactcgttcctacaaaggtctacctgccctagaaaagcctgctgttgaagaagaagtttctgaacaagaacatcaccaccatgaagaatccatctttgctgaaaccccaatctacactttgatcacgttcatcatcctcctgaccttcggttggccattgtacctaattgttaacttctctggtcacgaagccccacactgggtcaaccacttccaaactgttgctccattgtacgaaccacaccaaagaaagaacatcttttactctaactgtggtattgttgctatgggctctattttgacctatttgtccatggttttctctccattaactgttttcatgtactacggtatcccatacttgggtgttaatgcttggattgtttgcattacttacttacaacacactgatccaaaggttcctcacttcagagacaacgaatggaattttcaaagaggtgccgcttgtaccatcgatagatccttcggtactattgtcaaccacttgcaccaccacatcggcgattcccaccaatgtcaccacatgttctctcaaatgccattctacaatgctgtcgaagctactaagtatctaaaggccaagctaggtaagtactacatcttcgacgacactccaattgccaaggctttgtacagaaactggagagaatgtaaattcgtcgaagacgaaggtgatgttgttttctacaagcactaa

SEQ ID NO: 619 - DNA, 1212 bp, Artificial sequence
  Delta-15 Desaturase
atggcccctccacacgtcgtcgacgaacaagttagaagaagaatcgttgttgaagacgagattaagtcaaagaaacaattcgagagaaactacgtcccaatggatttcactatcaaggaaatcagagacgctatccctgctcacttattcatcagagacacaactaagtcaattctacacgttgtcaaagatttggttaccattgccattgttttctactgtgctaccttcatcgaaactttgccatccttggctttgagagttccagcatggatcacctactggattattcaaggtaccgtcatggttggtccatggattttggctcacgaatgtggtcacggtgccttttctcaacacaagtggatcaacaccattttgggttgggtcttgcattccgctttgttggttccttatcaggcatgggcaatgtcacactctaagcaccacaagtttactggtagtatggcgaaggatctggtcttcattccagctactcgttcctacaaaggtctacctgccctagaaaagcctgctgttgaagaagaagtttctgaacaagaacatcaccaccatgaagaatccatctttgctgaaaccccaatctacactttgggtgccttgttgttcgttttaaccttcggttggccattgtacctaattgttaacttctctggtcacgaagccccacactgggtcaaccacttccaaactgttgctccattgtacgaaccacaccaaagaaagaacatcttttactctaactgtggtattgttgctatgggctctattttgacctatttgtccatggttttctctccattaactgttttcatgtactacggtatcccatacttgggtgttaatgcttggattgtttgcattacttacttacaacacactgatccaaaggttcctcacttcagagacaacgaatggaattttcaaagaggtgccgcttgtaccatcgatagatccttcggtactattgtcaaccacttgcaccaccacatcggcgattcccaccaatgtcaccacatgttctctcaaatgccattctacaatgctgtcgaagctactaagtatctaaaggccaagctaggtaagtactacatcttcgacgacactccaattgccaaggctttgtacagaaactggagagaatgtaaattcgtcgaagacgaaggtgatgttgttttctacaagcactaa

SEQ ID NO: 620 - DNA, 1212 bp, Artificial sequence
  Delta-15 Desaturase
atggcccctccacacgtcgtcgacgaacaagttagaagaagaatcgttgttgaagacgagattaagtcaaagaaacaattcgagagaaactacgtcccaatggatttcactatcaaggaaatcagagacgctatccctgctcacttattcatcagagacacaactaagtcaattctacacgttgtcaaagatttggttaccattgccattgttttctactgtgctaccttcatcgaaactttgccatccttggctttgagagttccagcatggatcacctactggattattcaaggtaccgtcatggttggtccatggattttggctcacgaatgtggtcacggtgccttttctaatcacaagacgttcaacaccattttcggttgggtcttgcattccgctttgttggttccttatcaggcatgggcaatgtcacactctaagcaccacaagtttactggtagtatggcgaaggatctggtcttcattccagctactcgttcctacaaaggtctacctgccctagaaaagcctgctgttgaagaagaagtttctgaacaagaacatcaccaccatgaagaatccatctttgctgaaaccccaatctacactttgggtgccttgttgttcgttttaaccttcggttggccattgtacctaattgttaacttctctggtcacgaagccccacactgggtcaaccacttccaaactgttgctccattgtacgaaccacaccaaagaaagaacatcttttactctaactgtggtattgttgctatgggctctattttgacctatttgtccatggttttctctccattaactgttttcatgtactacggtatcccatacttgggtgttaatgcttggattgtttgcattacttacttacaacacactgatccaaaggttcctcacttcagagacaacgaatggaattttcaaagaggtgccgcttgtaccatcgatagatccttcggtactattgtcaaccacttgcaccaccacatcggcgattcccaccaatgtcaccacatgttctctcaaatgccattctacaatgctgtcgaagctactaagtatctaaaggccaagctaggtaagtactacatcttcgacgacactccaattgccaaggctttgtacagaaactggagagaatgtaaattcgtcgaagacgaaggtgatgttgttttctacaagcactaa

SEQ ID NO: 621 - DNA, 1212 bp, Artificial sequence
  Delta-15 Desaturase
atggcccctccacacgtcgtcgacgaacaagttagaagaagaatcgttgttgaagacgagattaagtcaaagaaacaattcgagagaaactacgtcccaatggatttcactatcaaggaaatcagagacgctatccctgctcacttattcatcagagacacaactaagtcaattctacacgttgtcaaagatttggttaccattgccattgttttctactgtgctaccttcatcgaaactttgccatccttggctttgagagttccagcatggatcacctactggattattcaaggtaccgtcatggttggtccatggattttggctcacgaatgtggtcacggtgccttttctaatcccaagtcgttcaacaacattttcggttgggtcttgcattccgctttgttggttccttatcaggcatgggcaatgtcacactctaagcaccacaaggatactggtcatatgactaaggatgttgtcttcattccagctactcgttcctacaaaggtctacctgccctagaaaagcctgctgttgaagaagaagtttctgaacaagaacatcaccaccatgaagaatccatctttgctgaaaccccaatctacactttgggtgccttgttgttcgttttaaccttcggttggccattgtacctaattgttaacttctctggtcacgaagccccacactgggtcaaccacttccaaactgttgctccattgtacgaaccacaccaaagaaagaacatcttttactctaactgtggtattgttgctatgggctctattttgacctatttgtccatggttttctctccattaactgttttcatgtactacggtatcccatacttgggtgttaatgcttggattgtttgcattacttacttacaacacactgatccaaaggttcctcacttcagagacaacgaatggaattttcaaagaggtgccgcttgtaccatcgatagatccttcggtactattgtcaaccacttgcaccaccacatcggcgattcccaccaatgtcaccacatgttctctcaaatgccattctacaatgctgtcgaagctactaagtatctaaaggccaagctaggtaagtactacatcttcgacgacactccaattgccaaggctttgtacagaaactggagagaatgtaaattcgtcgaagacgaaggtgatgttgttttctacaagcactaa

SEQ ID NO: 622 - DNA, 1212 bp, Artificial sequence
  Delta-15 Desaturase
atggcccctccacacgtcgtcgacgaacaagttagaagaagaatcgttgttgaagacgagattaagtcaaagaaacaattcgagagaaactacgtcccaatggatttcactatcaaggaaatcagagacgctatccctgctcacttattcatcagagacacaactaagtcaattctacacgttgtcaaagatttggttaccattgccattgttttctactgtgctaccttcatcgaaactttgccatccttggctttgagagttccagcatggatcacctacttgattattcaaggtaccgtcatggttggtccatggattttggctcacgaatgtggtcacggtgccttttctcagcacacgaggttcaactccattatcggttgggtcttgcattccgctttgttggttccttatcaggcatgggcaatgtcacactctaagcaccacaagggtactggttccatggagaaggatttcgtcttcattccagctactcgttcctacaaaggtctacctgccctagaaaagcctgctgttgaagaagaagtttctgaacaagaacatcaccaccatgaagaatccatctttgctgaaaccccaatctacactttgggtgccttgttgttcgttttaaccttcggttggccattgtacctaattgttaacttctctggtcacgaagccccacactgggtcaaccacttccaaactgttgctccattgtacgaaccacaccaaagaaagaacatcttttactctaactgtggtattgttgctatgggctctattttgacctatttgtccatggttttctctccattaactgttttcatgtactacggtatcccatacttgggtgttaatgcttggattgtttgcattacttacttacaacacactgatccaaaggttcctcacttcagagacaacgaatggaattttcaaagaggtgccgcttgtaccatcgatagatccttcggtactattgtcaaccacttgcaccaccacatcggcgattcccaccaatgtcaccacatgttctctcaaatgccattctacaatgctgtcgaagctactaagtatctaaaggccaagctaggtaagtactacatcttcgacgacactccaattgccaaggctttgtacagaaactggagagaatgtaaattcgtcgaagacgaaggtgatgttgttttctacaagcactaa

SEQ ID NO: 623 - DNA, 1212 bp, Artificial sequence
  Delta-15 Desaturase
atggcccctccacacgtcgtcgacgaacaagttagaagaagaatcgttgttgaagacgagattaagtcaaagaaacaattcgagagaaactacgtcccaatggatttcactatcaaggaaatcagagacgctatccctgctcacttattcatcagagacacaactaagtcaattctacacgttgtcaaagatttggttaccattgccattgttttctactgtgctaccttcatcgaaactttgccatccttggctttgagagttccagcatggatcacctactggattattcaaggtaccgtcattgttggtccatggattttggctcacgaatgtggtcacggtgccttttctaaacacacgtcgttcaacaacattatcggttgggtcttgcattccgctttgttggttccttatcaggcatgggcaatgtcacactctaagcaccacaagggtactggtactatgactaaggatgttgtcttcattccagctactcgttcctacaaaggtctacctgccctagaaaagcctgctgttgaagaagaagtttctgaacaagaacatcaccaccatgaagaatccatctttgctgaaaccccaatctacactttgggtgccttgttgttcgttttaaccttcggttggccattgtacctaattgttaacttctctggtcacgaagccccacactgggtcaaccacttccaaactgttgctccattgtacgaaccacaccaaagaaagaacatcttttactctaactgtggtattgttgctatgggctctattttgacctatttgtccatggttttctctccattaactgttttcatgtactacggtatcccatacttgggtgttaatgcttggattgtttgcattacttacttacaacacactgatccaaaggttcctcacttcagagacaacgaatggaattttcaaagaggtgccgcttgtaccatcgatagatccttcggtactattgtcaaccacttgcaccaccacatcggcgattcccaccaatgtcaccacatgttctctcaaatgccattctacaatgctgtcgaagctactaagtatctaaaggccaagctaggtaagtactacatcttcgacgacactccaattgccaaggctttgtacagaaactggagagaatgtaaattcgtcgaagacgaaggtgatgttgttttctacaagcactaa

SEQ ID NO: 624 - DNA, 1212 bp, Artificial sequence
  Delta-15 Desaturase
atggcccctccacacgtcgtcgacgaacaagttagaagaagaatcgttgttgaagacgagattaagtcaaagaaacaattcgagagaaactacgtcccaatggatttcactatcaaggaaatcagagacgctatccctgctcacttattcatcagagacacaactaagtcaattctacacgttgtcaaagatttggttaccattgccattgttttctactgtgctaccttcatcgaaactttgccatccttggctttgagagttccagcatggatcacctactggattattcaaggtaccgtcatggttggtccatggattttggctcacgaatgtggtcacggtgccttttctaagcacacgaggatcaacaacattttgggttgggtcttgcattccgctttgttggttccttatcaggcatgggcaatgtcacactctaagcaccacaagggtactggttccatgaagaaggatctggtcttcattccagctactcgttcctacaaaggtctacctgccctagaaaagcctgctgttgaagaagaagtttctgaacaagaacatcaccaccatgaagaatccatctttgctgaaaccccaatctacactttgggtgccttgttgttcgttttaaccttcggttggccattgtacctaattgttaacttctctggtcacgaagccccacactgggtcaaccacttccaaactgttgctccattgtacgaaccacaccaaagaaagaacatcttttactctaactgtggtattgttgctatgggctctattttgacctatttgtccatggttttctctccattaactgttttcatgtactacggtatcccatacttgggtgttaatgcttggattgtttgcattacttacttacaacacactgatccaaaggttcctcacttcagagacaacgaatggaattttcaaagaggtgccgcttgtaccatcgatagatccttcggtactattgtcaaccacttgcaccaccacatcggcgattcccaccaatgtcaccacatgttctctcaaatgccattctacaatgctgtcgaagctactaagtatctaaaggccaagctaggtaagtactacatcttcgacgacactccaattgccaaggctttgtacagaaactggagagaatgtaaattcgtcgaagacgaaggtgatgttgttttctacaagcactaa

SEQ ID NO: 625 - DNA, 1212 bp, Artificial sequence
  Delta-15 Desaturase
atggcccctccacacgtcgtcgacgaacaagttagaagaagaatcgttgttgaagacgagattaagtcaaagaaacaattcgagagaaactacgtcccaatggatttcactatcaaggaaatcagagacgctatccctgctcacttattcatcagagacacaactaagtcaattctacacgttgtcaaagatttggttaccattgccattgttttctactgtgctaccttcatcgaaactttgccatccttggctttgagagttccagcatggatcacctactggattattcaaggtaccgtcatggttggtccatggattttggctcacgaatgtggtcacggtgccttttctaaatacaagaggatcaactccattttcggttgggtcttgcattccgctttgttggttccttatcaggcatgggcaatgtcacactctaagcaccacaagtctactggtaatatgcagaaggatttggtcttcattccagctactcgttcctacaaaggtctacctgccctagaaaagcctgctgttgaagaagaagtttctgaacaagaacatcaccaccatgaagaatccatctttgctgaaaccccaatctacactttgggtgccttgttgttcgttttaaccttcggttggccattgtacctaattgttaacttctctggtcacgaagccccacactgggtcaaccacttccaaactgttgctccattgtacgaaccacaccaaagaaagaacatcttttactctaactgtggtattgttgctatgggctctattttgacctatttgtccatggttttctctccattaactgttttcatgtactacggtatcccatacttgggtgttaatgcttggattgtttgcattacttacttacaacacactgatccaaaggttcctcacttcagagacaacgaatggaattttcaaagaggtgccgcttgtaccatcgatagatccttcggtactattgtcaaccacttgcaccaccacatcggcgattcccaccaatgtcaccacatgttctctcaaatgccattctacaatgctgtcgaagctactaagtatctaaaggccaagctaggtaagtactacatcttcgacgacactccaattgccaaggctttgtacagaaactggagagaatgtaaattcgtcgaagacgaaggtgatgttgttttctacaagcactaa

SEQ ID NO: 626 - DNA, 1212 bp, Artificial sequence
  Delta-15 Desaturase
atggcccctccacacgtcgtcgacgaacaagttagaagaagaatcgttgttgaagacgagattaagtcaaagaaacaattcgagagaaactacgtcccaatggatttcactatcaaggaaatcagagacgctatccctgctcacttattcatcagagacacaactaagtcaattctacacgttgtcaaagatttggttaccattgccattgttttctactgtgctaccttcatcgaaactttgccatccttggctttgagagttccagcatggatcacctactggattattcaaggtaccgtcatggttggtccatggattttggctcacgaatgtggtcacggtgccttttctgaatccaagtggatcaactccattttcggttgggtcttgcattccgctttgttggttccttatcaggcatgggcaatgtcacactctaagcaccacaagggtactggttccatgacgaaggatttcgtcttcattccagctactcgttcctacaaaggtctacctgccctagaaaagcctgctgttgaagaagaagtttctgaacaagaacatcaccaccatgaagaatccatctttgctgaaaccccaatctacactttgggtgccttgttgttcgttttaaccttcggttggccattgtacctaattgttaacttctctggtcacgaagccccacactgggtcaaccacttccaaactgttgctccattgtacgaaccacaccaaagaaagaacatcttttactctaactgtggtattgttgctatgggctctattttgacctatttgtccatggttttctctccattaactgttttcatgtactacggtatcccatacttgggtgttaatgcttggattgtttgcattacttacttacaacacactgatccaaaggttcctcacttcagagacaacgaatggaattttcaaagaggtgccgcttgtaccatcgatagatccttcggtactattgtcaaccacttgcaccaccacatcggcgattcccaccaatgtcaccacatgttctctcaaatgccattctacaatgctgtcgaagctactaagtatctaaaggccaagctaggtaagtactacatcttcgacgacactccaattgccaaggctttgtacagaaactggagagaatgtaaattcgtcgaagacgaaggtgatgttgttttctacaagcactaa

SEQ ID NO: 627 - DNA, 1212 bp, Artificial sequence
  Delta-15 Desaturase
atggcccctccacacgtcgtcgacgaacaagttagaagaagaatcgttgttgaagacgagattaagtcaaagaaacaattcgagagaaactacgtcccaatggatttcactatcaaggaaatcagagacgctatccctgctcacttattcatcagagacacaactaagtcaattctacacgttgtcaaagatttggttaccattgccattgttttctactgtgctaccttcatcgaaactttgccatccttggctttgagagttccagcatggatcacctactggattattcaaggtaccgtcatggttggtccatggattttggctcacgaatgtggtcacggtgccttttctcaacccacgtcgatcaacaccattatgggttgggtcttgcattccgctttgttggttccttatcaggcatgggcaatgtcacactctaagcaccacaagggtactggttccatgaagaaggatatggtcttcattccagctactcgttcctacaaatgtctacctgccctagaaaagcctgctgttgaagaagaagtttctgaacaagaacatcaccaccatgaagaatccatctttgctgaaaccccaatctacactttgggtgccttgttgttcgttttaaccttcggttggccattgtacctaattgttaacttctctggtcacgaagccccacactgggtcaaccacttccaaactgttgctccattgtacgaaccacaccaaagaaagaacatcttttactctaactgtggtattgttgctatgggctctattttgacctatttgtccatggttttctctccattaactgttttcatgtactacggtatcccatacttgggtgttaatgcttggattgtttgcattacttacttacaacacactgatccaaaggttcctcacttcagagacaacgaatggaattttcaaagaggtgccgcttgtaccatcgatagatccttcggtactattgtcaaccacttgcaccaccacatcggcgattcccaccaatgtcaccacatgttctctcaaatgccattctacaatgctgtcgaagctactaagtatctaaaggccaagctaggtaagtactacatcttcgacgacactccaattgccaaggctttgtacagaaactggagagaatgtaaattcgtcgaagacgaaggtgatgttgttttctacaagcactaa

SEQ ID NO: 628 - DNA, 1212 bp, Artificial sequence
  Delta-15 Desaturase
atggcccctccacacgtcgtcgacgaacaagttagaagaagaatcgttgttgaagacgagattaagtcaaagaaacaattcgagagaaactacgtcccaatggatttcactatcaaggaaatcagagacgctatccctgctcacttattcatcagagacacaactaagtcaattctacacgttgtcaaagatttggttaccattgccattgttttctactgtgctaccttcatcgaaactttgccatccttggctttgagagttccagcatggatcacctactggattattcaaggtaccgtcatggttggtccatggattttggctcacgaatgtggtcacggtgccttttctgaccccaggtggttcaactccattatgggttgggtcttgcattccgctttgttggttccttatcaggcatgggcaatgtcacactctaagcaccacaagggtactggttccatgaagaaggatatggtcttcattccagctactcgttcctacaaatgtctacctgccctagaaaagcctgctgttgaagaagaagtttctgaacaagaacatcaccaccatgaagaatccatctttgctgaaaccccaatctacactttgggtgccttgttgttcgttttaaccttcggttggccattgtacctaattgttaacttctctggtcacgaagccccacactgggtcaaccacttccaaactgttgctccattgtacgaaccacaccaaagaaagaacatcttttactctaactgtggtattgttgctatgggctctattttgacctatttgtccatggttttctctccattaactgttttcatgtactacggtatcccatacttgggtgttaatgcttggattgtttgcattacttacttacaacacactgatccaaaggttcctcacttcagagacaacgaatggaattttcaaagaggtgccgcttgtaccatcgatagatccttcggtactattgtcaaccacttgcaccaccacatcggcgattcccaccaatgtcaccacatgttctctcaaatgccattctacaatgctgtcgaagctactaagtatctaaaggccaagctaggtaagtactacatcttcgacgacactccaattgccaaggctttgtacagaaactggagagaatgtaaattcgtcgaagacgaaggtgatgttgttttctacaagcactaa

SEQ ID NO: 629 - DNA, 1212 bp, Artificial sequence
  Delta-15 Desaturase
atggcccctccacacgtcgtcgacgaacaagttagaagaagaatcgttgttgaagacgagattaagtcaaagaaacaattcgagagaaactacgtcccaatggatttcactatcaaggaaatcagagacgctatccctgctcacttattcatcagagacacaactaagtcaattctacacgttgtcaaagatttggttaccattgccattgttttctactgtgctaccttcatcgaaactttgccatccttggctttgagagttccagcatggatcacctactggattattcaaggtaccgtcatggttggtccatggattttggctcacgaatgtggtcacggtgccttttctgaacccacgacgatcaacaccattatcggttgggtcttgcattccgctttgttggttccttatcaggcatgggcaatgtcacactctaagcaccacaagggtactggttccatgaagaaggatatggtcttcattccagctactcgttcctacaaatgtctacctgccctagaaaagcctgctgttgaagaagaagtttctgaacaagaacatcaccaccatgaagaatccatctttgctgaaaccccaatctacactttgggtgccttgttgttcgttttaaccttcggttggccattgtacctaattgttaacttctctggtcacgaagccccacactgggtcaaccacttccaaactgttgctccattgtacgaaccacaccaaagaaagaacatcttttactctaactgtggtattgttgctatgggctctattttgacctatttgtccatggttttctctccattaactgttttcatgtactacggtatcccatacttgggtgttaatgcttggattgtttgcattacttacttacaacacactgatccaaaggttcctcacttcagagacaacgaatggaattttcaaagaggtgccgcttgtaccatcgatagatccttcggtactattgtcaaccacttgcaccaccacatcggcgattcccaccaatgtcaccacatgttctctcaaatgccattctacaatgctgtcgaagctactaagtatctaaaggccaagctaggtaagtactacatcttcgacgacactccaattgccaaggctttgtacagaaactggagagaatgtaaattcgtcgaagacgaaggtgatgttgttttctacaagcactaa

SEQ ID NO: 630 - DNA, 1212 bp, Artificial sequence
  Delta-15 Desaturase
atggcccctccacacgtcgtcgacgaacaagttagaagaagaatcgttgttgaagacgagattaagtcaaagaaacaattcgagagaaactacgtcccaatggatttcactatcaaggaaatcagagacgctatccctgctcacttattcatcagagacacaactaagtcaattctacacgttgtcaaagatttggttaccattgccattgttttctactgtgctaccttcatcgaaactttgccatccttggctttgagagttccagcatggatcacctactggattattcaaggtaccgtcatggttggtccatggattttggctcacgaatgtggtcacggtgccttttctcagtccaagtcgatcaacaacattttcggttgggtcttgcattccgctttgttggttccttatcaggcatgggcaatgtcacactctaagcaccacaagggtactggttccatgaagaaggatctggtcttcattccagctactcgttcctacaaaggtctacctgccctagaaaagcctgctgttgaagaagaagtttctgaacaagaacatcaccaccatgaagaatccatctttgctgaaaccccaatctacactttgggtgccttgttgttcgttttaaccttcggttggccattgtacctaattgttaacttctctggtcacgaagccccacactgggtcaaccacttccaaactgttgctccattgtacgaaccacaccaaagaaagaacatcttttactctaactgtggtattgttgctatgggctctattttgacctatttgtccatggttttctctccattaactgttttcatgtactacggtatcccatacttgggtgttaatgcttggattgtttgcattacttacttacaacacactgatccaaaggttcctcacttcagagacaacgaatggaattttcaaagaggtgccgcttgtaccatcgatagatccttcggtactattgtcaaccacttgcaccaccacatcggcgattcccaccaatgtcaccacatgttctctcaaatgccattctacaatgctgtcgaagctactaagtatctaaaggccaagctaggtaagtactacatcttcgacgacactccaattgccaaggctttgtacagaaactggagagaatgtaaattcgtcgaagacgaaggtgatgttgttttctacaagcactaa

SEQ ID NO: 631 - DNA, 1212 bp, Artificial sequence
  Delta-15 Desaturase
atggcccctccacacgtcgtcgacgaacaagttagaagaagaatcgttgttgaagacgagattaagtcaaagaaacaattcgagagaaactacgtcccaatggatttcactatcaaggaaatcagagacgctatccctgctcacttattcatcagagacacaactaagtcaattctacacgttgtcaaagatttggttaccattgccattgttttctactgtgctaccttcatcgaaactttgccatccttggctttgagagttccagcatggatcacctactggattattcaaggtaccgtcatggttggtccatggattttggctcacgaatgtggtcacggtgccttttctgaacacaagacgatcaactccattatgggttgggtcttgcattccgctttgttggttccttatcaggcatgggcaatgtcacactctaagcaccacaagggtactggtactatgactaaggatgttgtcttcattccagctactcgttcctacaaaggtctacctgccctagaaaagcctgctgttgaagaagaagtttctgaacaagaacatcaccaccatgaagaatccatctttgctgaaaccccaatctacactttgggtgccttgttgttcgttttaaccttcggttggccattgtacctaattgttaacttctctggtcacgaagccccacactgggtcaaccacttccaaactgttgctccattgtacgaaccacaccaaagaaagaacatcttttactctaactgtggtattgttgctatgggctctattttgacctatttgtccatggttttctctccattaactgttttcatgtactacggtatcccatacttgggtgttaatgcttggattgtttgcattacttacttacaacacactgatccaaaggttcctcacttcagagacaacgaatggaattttcaaagaggtgccgcttgtaccatcgatagatccttcggtactattgtcaaccacttgcaccaccacatcggcgattcccaccaatgtcaccacatgttctctcaaatgccattctacaatgctgtcgaagctactaagtatctaaaggccaagctaggtaagtactacatcttcgacgacactccaattgccaaggctttgtacagaaactggagagaatgtaaattcgtcgaagacgaaggtgatgttgttttctacaagcactaa

SEQ ID NO: 632 - DNA, 1212 bp, Artificial sequence
  Delta-15 Desaturase
atggcccctccacacgtcgtcgacgaacaagttagaagaagaatcgttgttgaagacgagattaagtcaaagaaacaattcgagagaaactacgtcccaatggatttcactatcaaggaaatcagagacgctatccctgctcacttattcatcagagacacaactaagtcaattctacacgttgtcaaagatttggttaccattgccattgttttctactgtgctaccttcatcgaaactttgccatccttggctttgagagttccagcatggatcacctactggattattcaaggtaccgtcatggttggtccatggattttggctcacgaatgtggtcacggtgccttttctcatcccaggtggttcaacaacattatgggttgggtcttgcattccgctttgttggttccttatcaggcatgggcaatgtcacactctaagcaccacaagggtactggttccatggcgaaggatctggtcttcattccagctactcgttcctacaaaggtctacctgccctagaaaagcctgctgttgaagaagaagtttctgaacaagaacatcaccaccatgaagaatccatctttgctgaaaccccaatctacactttgggtgccttgttgttcgttttaaccttcggttggccattgtacctaattgttaacttctctggtcacgaagccccacactgggtcaaccacttccaaactgttgctccattgtacgaaccacaccaaagaaagaacatcttttactctaactgtggtattgttgctatgggctctattttgacctatttgtccatggttttctctccattaactgttttcatgtactacggtatcccatacttgggtgttaatgcttggattgtttgcattacttacttacaacacactgatccaaaggttcctcacttcagagacaacgaatggaattttcaaagaggtgccgcttgtaccatcgatagatccttcggtactattgtcaaccacttgcaccaccacatcggcgattcccaccaatgtcaccacatgttctctcaaatgccattctacaatgctgtcgaagctactaagtatctaaaggccaagctaggtaagtactacatcttcgacgacactccaattgccaaggctttgtacagaaactggagagaatgtaaattcgtcgaagacgaaggtgatgttgttttctacaagcactaa

SEQ ID NO: 633 - DNA, 1212 bp, Artificial sequence
  Delta-15 Desaturase
atggcccctccacacgtcgtcgacgaacaagttagaagaagaatcgttgttgaagacgagattaagtcaaagaaacaattcgagagaaactacgtcccaatggatttcactatcaaggaaatcagagacgctatccctgctcacttattcatcagagacacaactaagtcaattctacacgttgtcaaagatttggttaccattgccattgttttctactgtgctaccttcatcgaaactttgccatccttggctttgagagttccagcatggatcacctactggattattcaaggtaccgtcatggttggtccatggattttggctcacgaatgtggtcacggtgccttttctaaatacaagaggttcaactacattttcggttgggtcttgcattccgctttgttggttccttatcaggcatgggcaatgtcacactctaagcaccacaagggtactggttccatgacgaaggatttcgtcttcattccagctactcgttcctacaaaggtctacctgccctagaaaagcctgctgttgaagaagaagtttctgaacaagaacatcaccaccatgaagaatccatctttgctgaaaccccaatctacactttgggtgccttgttgttcgttttaaccttcggttggccattgtacctaattgttaacttctctggtcacgaagccccacactgggtcaaccacttccaaactgttgctccattgtacgaaccacaccaaagaaagaacatcttttactctaactgtggtattgttgctatgggctctattttgacctatttgtccatggttttctctccattaactgttttcatgtactacggtatcccatacttgggtgttaatgcttggattgtttgcattacttacttacaacacactgatccaaaggttcctcacttcagagacaacgaatggaattttcaaagaggtgccgcttgtaccatcgatagatccttcggtactattgtcaaccacttgcaccaccacatcggcgattcccaccaatgtcaccacatgttctctcaaatgccattctacaatgctgtcgaagctactaagtatctaaaggccaagctaggtaagtactacatcttcgacgacactccaattgccaaggctttgtacagaaactggagagaatgtaaattcgtcgaagacgaaggtgatgttgttttctacaagcactaa

SEQ ID NO: 634 - DNA, 1212 bp, Artificial sequence
  Delta-15 Desaturase
atggcccctccacacgtcgtcgacgaacaagttagaagaagaatcgttgttgaagacgagattaagtcaaagaaacaattcgagagaaactacgtcccaatggatttcactatcaaggaaatcagagacgctatccctgctcacttattcatcagagacacaactaagtcaattctacacgttgtcaaagatttggttaccattgccattgttttctactgtgctaccttcatcgaaactttgccatccttggctttgagagttccagcatggatcacctactggattattcaaggtaccgtcatggttggtccatggattttggctcacgaatgtggtcacggtgccttttctgaacacacgacgatcaactccattatcggttgggtcttgcattccgctttgttggttccttatcaggcatgggcaatgtcacactctaagcaccacaagggtactggttccatgtcgaaggatttcgtcttcattccagctactcgttcctacaaaggtctacctgccctagaaaagcctgctgttgaagaagaagtttctgaacaagaacatcaccaccatgaagaatccatctttgctgaaaccccaatctacactttgggtgccttgttgttcgttttaaccttcggttggccattgtacctaattgttaacttctctggtcacgaagccccacactgggtcaaccacttccaaactgttgctccattgtacgaaccacaccaaagaaagaacatcttttactctaactgtggtattgttgctatgggctctattttgacctatttgtccatggttttctctccattaactgttttcatgtactacggtatcccatacttgggtgttaatgcttggattgtttgcattacttacttacaacacactgatccaaaggttcctcacttcagagacaacgaatggaattttcaaagaggtgccgcttgtaccatcgatagatccttcggtactattgtcaaccacttgcaccaccacatcggcgattcccaccaatgtcaccacatgttctctcaaatgccattctacaatgctgtcgaagctactaagtatctaaaggccaagctaggtaagtactacatcttcgacgacactccaattgccaaggctttgtacagaaactggagagaatgtaaattcgtcgaagacgaaggtgatgttgttttctacaagcactaa

SEQ ID NO: 635 - DNA, 1212 bp, Artificial sequence
  Delta-15 Desaturase
atggcccctccacacgtcgtcgacgaacaagttagaagaagaatcgttgttgaagacgagattaagtcaaagaaacaattcgagagaaactacgtcccaatgtatttcactatcaaggaaatcagagacgctatccctgctcacttattcatcagagacacaactaagtcaattctacacgttgtcaaagatttggttaccattgccattgttttctactgtgctaccttcatcgaaactttgccatccttggctttgagagttccagcatggatcacctactggattattcaaggtaccgtcatggttggtccatggattttggctcacgaatgtggtcacggtgccttttctcaatccacgtggatcaacaccattttgggttgggtcttgcattccgctttgttggttccttatcaggcatgggcaatgtcacactctaagcaccacaaggatactggtcatatgactaaggatgttgtcttcattccagctactcgttcctacaaaggtctacctgccctagaaaagcctgctgttgaagaagaagtttctgaacaagaacatcaccaccatgaagaatccatctttgctgaaaccccaatctacactttgggtgccttgttgttcgttttaaccttcggttggccattgtacctaattgttaacttctctggtcacgaagccccacactgggtcaaccacttccaaactgttgctccattgtacgaaccacaccaaagaaagaacatcttttactctaactgtggtattgttgctatgggctctattttgacctatttgtccatggttttctctccattaactgttttcatgtactacggtatcccatacttgggtgttaatgcttggattgtttgcattacttacttacaacacactgatccaaaggttcctcacttcagagacaacgaatggaattttcaaagaggtgccgcttgtaccatcgatagatccttcggtactattgtcaaccacttgcaccaccacatcggcgattcccaccaatgtcaccacatgttctctcaaatgccattctacaatgctgtcgaagctactaagtatctaaaggccaagctaggtaagtactacatcttcgacgacactccaattgccaaggctttgtacagaaactggagagaatgtaaattcgtcgaagacgaaggtgatgttgttttctacaagcactaa

SEQ ID NO: 636 - DNA, 1212 bp, Artificial sequence
  Delta-15 Desaturase
atggcccctccacacgtcgtcgacgaacaagttagaagaagaatcgttgttgaagacgagattaagtcaaagaaacaattcgagagaaactacgtcccaatggatttcactatcaaggaaatcagagacgctatccctgctcacttattcatcagagacacaactaagtcaattctacacgttgtcaaagatttggttaccattgccattgttttctactgtgctaccttcatcgaaactttgccatccttggctttgagagttccagcatggatcacctactggattattcaaggtaccgtcatggttggtccatggattttggctcacgaatgtggtcacggtgccttttctaagtccaagaggttcaactccattttcggttgggtcttgcattccgctttgttggttccttatcaggcatgggcaatgtcacactctaagcaccacaagtttactggtactatgactaaggatgttgtcttcattccagctactcgttcctacaaaggtctacctgccctagaaaagcctgctgttgaagaagaagtttctgaacaagaacatcaccaccatgaagaatccatctttgctgaaaccccaatctacactttgggtgccttgttgttcgttttaaccttcggttggccattgtacctaattgttaacttctctggtcacgaagccccacactgggtcaaccacttccaaactgttgctccattgtacgaaccacaccaaagaaagaacatcttttactctaactgtggtattgttgctatgggctctattttgacctatttgtccatggttttctctccattaactgttttcatgtactacggtatcccatacttgggtgttaatgcttggattgtttgcattacttacttacaacacactgatccaaaggttcctcacttcagagacaacgaatggaattttcaaagaggtgccgcttgtaccatcgatagatccttcggtactattgtcaaccacttgcaccaccacatcggcgattcccaccaatgtcaccacatgttctctcaaatgccattctacaatgctgtcgaagctactaagtatctaaaggccaagctaggtaagtactacatcttcgacgacactccaattgccaaggctttgtacagaaactggagagaatgtaaattcgtcgaagacgaaggtgatgttgttttctacaagcactaa

SEQ ID NO: 637 - DNA, 1212 bp, Artificial sequence
  Delta-15 Desaturase
atggcccctccacacgtcgtcgacgaacaagttagaagaagaatcgttgttgaagacgagattaagtcaaagaaacaattcgagagaaactacgtcccaatggatttcactatcaaggaaatcagagacgctatccctgctcacttattcatcagagacacaactaagtcaattctacacgttgtcaaagatttggttaccattgccattgttttctactgtgctaccttcatcgaaactttgccatccttggctttgagagttccagcatggatcacctactggattattcaaggtaccgtcatggttggtccatggattttggctcacgaatgtggtcacggtgccttttctgagtacaagacgatcaacaacattttgggttgggtcttgcattccgctttgttggttccttatcaggcatgggcaatgtcacactctaagcaccacaaggctactggtcatatgaagaaggatttggtcttcattccagctactcgttcctacaaaggtctacctgccctagaaaagcctgctgttgaagaagaagtttctgaacaagaacatcaccaccatgaagaatccatctttgctgaaaccccaatctacactttgggtgccttgttgttcgttttaaccttcggttggccattgtacctaattgttaacttctctggtcacgaagccccacactgggtcaaccacttccaaactgttgctccattgtacgaaccacaccaaagaaagaacatcttttactctaactgtggtattgttgctatgggctctattttgacctatttgtccatggttttctctccattaactgttttcatgtactacggtatcccatacttgggtgttaatgcttggattgtttgcattacttacttacaacacactgatccaaaggttcctcacttcagagacaacgaatggaattttcaaagaggtgccgcttgtaccatcgatagatccttcggtactattgtcaaccacttgcaccaccacatcggcgattcccaccaatgtcaccacatgttctctcaaatgccattctacaatgctgtcgaagctactaagtatctaaaggccaagctaggtaagtactacatcttcgacgacactccaattgccaaggctttgtacagaaactggagagaatgtaaattcgtcgaagacgaaggtgatgttgttttctacaagcactaa

SEQ ID NO: 638 - DNA, 1212 bp, Artificial sequence
  Delta-15 Desaturase
atggcccctccacacgtcgtcgacgaacaagttagaagaagaatcgttgttgaagacgagattaagtcaaagaaacaattcgagagaaactacgtcccaatggatttcactatcaaggaaatcagagacgctatccctgctcacttattcatcagagacacaactaagtcaattctacacgttgtcaaagatttggttaccattgccattgttttctactgtgctaccttcatcgaaactttgccatccttggctttgagagttccagcatggatcacctactggattattcaaggtaccgtcatggttggtccatggattttggctcacgaatgtggtcacggtgccttttctaaatacaagacgatcaactccattttcggttgggtcttgcattccgctttgttggttccttatcaggcatgggcaatgtcacactctaagcaccacaagtttactggtgctatgactaaggatgttgtcttcattccagctactcgttcctacaaaggtctacctgccctagaaaagcctgctgttgaagaagaagtttctgaacaagaacatcaccaccatgaagaatccatctttgctgaaaccccaatctacactttgggtgccttgttgttcgttttaaccttcggttggccattgtacctaattgttaacttctctggtcacgaagccccacactgggtcaaccacttccaaactgttgctccattgtacgaaccacaccaaagaaagaacatcttttactctaactgtggtattgttgctatgggctctattttgacctatttgtccatggttttctctccattaactgttttcatgtactacggtatcccatacttgggtgttaatgcttggattgtttgcattacttacttacaacacactgatccaaaggttcctcacttcagagacaacgaatggaattttcaaagaggtgccgcttgtaccatcgatagatccttcggtactattgtcaaccacttgcaccaccacatcggcgattcccaccaatgtcaccacatgttctctcaaatgccattctacaatgctgtcgaagctactaagtatctaaaggccaagctaggtaagtactacatcttcgacgacactccaattgccaaggctttgtacagaaactggagagaatgtaaattcgtcgaagacgaaggtgatgttgttttctacaagcactaa

SEQ ID NO: 639 - DNA, 1212 bp, Artificial sequence
  Delta-15 Desaturase
atggcccctccacacgtcgtcgacgaacaagttagaagaagaatcgttgttgaagacgagattaagtcaaagaaacaattcgagagaaactacgtcccaatggatttcactatcaaggaaatcagagacgctatccctgctcacttattcatcagagacacaactaagtcaattctacacgttgtcaaagatttggttaccattgccattgttttctactgtgctaccttcatcgaaactttgccatccttggctttgagagttccagcatggatcacctactggattattcaaggtaccgtcatggttggtccatggattttggctcacgaatgtggtcacggtgccttttctgaatacaagacgttcaacaccattatgggttgggtcttgcattccgctttgttggttccttatcaggcatgggcaatgtcacactctaagcaccacaagtatactggtgctatgactaaggatgttgtcttcattccagctactcgttcctacaaaggtctacctgccctagaaaagcctgctgttgaagaagaagtttctgaacaagaacatcaccaccatgaagaatccatctttgctgaaaccccaatctacactttgggtgccttgttgttcgttttaaccttcggttggccattgtacctaattgttaacttctctggtcacgaagccccacactgggtcaaccacttccaaactgttgctccattgtacgaaccacaccaaagaaagaacatcttttactctaactgtggtattgttgctatgggctctattttgacctatttgtccatggttttctctccattaactgttttcatgtactacggtatcccatacttgggtgttaatgcttggattgtttgcattacttacttacaacacactgatccaaaggttcctcacttcagagacaacgaatggaattttcaaagaggtgccgcttgtaccatcgatagatccttcggtactattgtcaaccacttgcaccaccacatcggcgattcccaccaatgtcaccacatgttatctcaaatgccattctacaatgctgtcgaagctactaagtatctaaaggccaagctaggtaagtactacatcttcgacgacactccaattgccaaggctttgtacagaaactggagagaatgtaaattcgtcgaagacgaaggtgatgttgttttctacaagcactaa

SEQ ID NO: 640 - DNA, 1212 bp, Artificial sequence
  Delta-15 Desaturase
atggcccctccacacgtcgtcgacgaacaagttagaagaagaatcgttgttgaagacgagattaagtcaaagaaacaattcgagagaaactacgtcccaatggatttcactatcaaggaaatcagagacgctatccctgctcacttattcatcagagacacaactaagtcaattctacacgttgtcaaagatttggttaccattgccattgttttctactgtgctaccttcatcgaaactttgccatccttggctttgagagttccagcatggatcacctactggattattcaaggtaccgtcatggttggtccatggattttggctcacgaatgtggtcacggtgccttttctaaacacaagaggttcaacaccattatcggttgggtcttgcattccgctttgttggttccttatcaggcatgggcaatgtcacactctaagcaccacaagtttactggtactatggcgaaggatgtcgtcttcattccagctactcgttcctacaaaggtctacctgccctagaaaagcctgctgttgaagaagaagtttctgaacaagaacatcaccaccatgaagaatccatctttgctgaaaccccaatctacactttgggtgccttgttgttcgttttaaccttcggttggccattgtacctaattgttaacttctctggtcacgaagccccacactgggtcaaccacttccaaactgttgctccattgtacgaaccacaccaaagaaagaacatcttttactctaactgtggtattgttgctatgggctctattttgacctatttgtccatggttttctctccattaactgttttcatgtactacggtatcccatacttgggtgttaatgcttggattgtttgcattacttacttacaacacactgatccaaaggttcctcacttcagagacaacgaatggaattttcaaagaggtgccgcttgtaccatcgatagatccttcggtactattgtcaaccacttgcaccaccacatcggcgattcccaccaatgtcaccacatgttctctcaaatgccattctacaatgctgtcgaagctactaagtatctaaaggccaagctaggtaagtactacatcttcgacgacactccaattgccaaggctttgtacagaaactggagagaatgtaaattcgtcgaagacgaaggtgatgttgttttctacaagcactaa

SEQ ID NO: 641 - DNA, 1212 bp, Artificial sequence
  Delta-15 Desaturase
atggcccctccacacgtcgtcgacgaacaagttagaagaagaatcgttgttgaagacgagattaagtcaaagaaacaattcgagagaaactacgtcccaatggatttcactatcaaggaaatcagagacgctatccctgctcacttattcatcagagacacaactaagtcaattctacacgttgtcaaagatttggttaccattgccattgttttctactgtgctaccttcatcgaaactttgccatccttggctttgagagttccagcatggatcacctactggattattcaaggtaccgtcatggttggtccatggattttggctcacgaatgtggtcacggtgccttttctaagcacaggtcgttcaactccattttgggttgggtcttgcattccgctttgttggttccttatcaggcatgggcaatgtcacactctaagcaccacaagtttactggtactatggcgaaggatgtcgtcttcattccagctactcgttcctacaaaggtctacctgccctagaaaagcctgctgttgaagaagaagtttctgaacaagaacatcaccaccatgaagaatccatctttgctgaaaccccaatctacactttgggtgccttgttgttcgttttaaccttcggttggccattgtacctaattgttaacttctctggtcacgaagccccacactgggtcaaccacttccaaactgttgctccattgtacgaaccacaccaaagaaagaacatcttttactctaactgtggtattgttgctatgggctctattttgacctatttgtccatggttttctctccattaactgttttcatgtactacggtatcccatacttgggtgttaatgcttggattgtttgcattacttacttacaacacactgatccaaaggttcctcacttcagagacaacgaatggaattttcaaagaggtgccgcttgtaccatcgatagatccttcggtactattgtcaaccacttgcaccaccacatcggcgattcccaccaatgtcaccacatgttctctcaaatgccattctacaatgctgtcgaagctactaagtatctaaaggccaagctaggtaagtactacatcttcgacgacactccaattgccaaggctttgtacagaaactggagagaatgtaaattcgtcgaagacgaaggtgatgttgttttctacaagcactaa

SEQ ID NO: 642 - DNA, 1212 bp, Artificial sequence
  Delta-15 Desaturase
atggcccctccacacgtcgtcgacgaacaagttagaagaagaatcgttgttgaagacgagattaagtcaaagaaacaattcgagagaaactacgtcccaatggatttcactatcaaggaaatcagagacgctatccctgctcacttattcatcagagacacaactaagtcaattctacacgttgtcaaagatttggttaccattgccattgttttctactgtgctaccttcatcgaaactttgccatccttggctttgagagttccagcatggatcacctactggattattcaaggtaccgtcatggttggtccatggattttggctcacgaatgtggtcacggtgccttttctaaatacaggaggttcaacaccattttgggttgggtcttgcattccgctttgttggttccttatcaggcatgggcaatgtcacactctaagcaccacaagtttactggtactatggcgaaggatgtcgtcttcattccagctactcgttcctacaaaggtctacctgccctagaaaagcctgctgttgaagaagaagtttctgaacaagaacatcaccaccatgaagaatccatctttgctgaaaccccaatctacactttgggtgccttgttgttcgttttaaccttcggttggccattgtacctaattgttaacttctctggtcacgaagccccacactgggtcaaccacttccaaactgttgctccattgtacgaaccacaccaaagaaagaacatcttttactctaactgtggtattgttgctatgggctctattttgacctatttgtccatggttttctctccattaactgttttcatgtactacggtatcccatacttgggtgttaatgcttggattgtttgcattacttacttacaacacactgatccaaaggttcctcacttcagagacaacgaatggaattttcaaagaggtgccgcttgtaccatcgatagatccttcggtactattgtcaaccacttgcaccaccacatcggcgattcccaccaatgtcaccacatgttctctcaaatgccattctacaatgctgtcgaagctactaagtatctaaaggccaagctaggtaagtactacatcttcgacgacactccaattgccaaggctttgtacagaaactggagagaatgtaaattcgtcgaagacgaaggtgatgttgttttctacaagcactaa

SEQ ID NO: 643 - DNA, 1212 bp, Artificial sequence
  Delta-15 Desaturase
atggcccctccacacgtcgtcgacgaacaagttagaagaagaatcgttgttgaagacgagattaagtcaaagaaacaattcgagagaaactacgtcccaatggatttcactatcaaggaaatcagagacgctatccctgctcacttattcatcagagacacaactaagtcaattctacacgttgtcaaagatttggttaccattgccattgttttctactgtgctaccttcatcgaaactttgccatccttggctttgagagttccagcatggatcacctactggattattcaaggtaccgtcatggttggtccatggattttggctcacgaatgtggtcacggtgccttttctaaatccaagtcgatcaacaccattatgggttgggtcttgcattccgctttgttggttccttatcaggcatgggcaatgtcacactctaagcaccacaagtttactggtactatggcgaaggatgtcgtcttcattccagctactcgttcctacaaaggtctacctgccctagaaaagcctgctgttgaagaagaagtttctgaacaagaacatcaccaccatgaagaatccatctttgctgaaaccccaatctacactttgggtgccttgttgttcgttttaaccttcggttggccattgtacctaattgttaacttctctggtcacgaagccccacactgggtcaaccacttccaaactgttgctccattgtacgaaccacaccaaagaaagaacatcttttactctaactgtggtattgttgctatgggctctattttgacctatttgtccatggttttctctccattaactgttttcatgtactacggtatcccatacttgggtgttaatgcttggattgtttgcattacttacttacaacacactgatccaaaggttcctcacttcagagacaacgaatggaattttcaaagaggtgccgcttgtaccatcgatagatccttcggtactattgtcaaccacttgcaccaccacatcggcgattcccaccaatgtcaccacatgttctctcaaatgccattctacaatgctgtcgaagctactaagtatctaaaggccaagctaggtaagtactacatcttcgacgacactccaattgccaaggctttgtacagaaactggagagaatgtaaattcgtcgaagacgaaggtgatgttgttttctacaagcactaa

SEQ ID NO: 644 - DNA, 1212 bp, Artificial sequence
  Delta-15 Desaturase
atggcccctccacacgtcgtcgacgaacaagttagaagaagaatcgttgttgaagacgagattaagtcaaagaaacaattcgagagaaactacgtcccaatggatttcactatcaaggaaatcagagacgctatccctgctcacttattcatcagagacacaactaagtcaattctacacgttgtcaaagatttggttaccattgccattgttttctactgtgctaccttcatcgaaactttgccatccttggctttgagagttccagcatggatcacctactggattattcaaggtaccgtcatggttggtccatggattttggctcacgaatgtggtcacggtgccttttctaaatccaagtcgttcaacaccattttgggttgggtcttgcattccgctttgttggttccttatcaggcatgggcaatgtcacactctaagcaccacaagtttactggtactatggcgaaggatgtcgtcttcattccagctactcgttcctacaaaggtctacctgccctagaaaagcctgctgttgaagaagaagtttctgaacaagaacatcaccaccatgaagaatccatctttgctgaaaccccaatctacactttgggtgccttgttgttcgttttaaccttcggttggccattgtacctaattgttaacttctctggtcacgaagccccacactgggtcaaccacttccaaactgttgctccattgtacgaaccacaccaaagaaagaacatcttttactctaactgtggtattgttgctatgggctctattttgacctatttgtccatggttttctctccattaactgttttcatgtactacggtatcccatacttgggtgttaatgcttggattgtttgcattacttacttacaacacactgatccaaaggttcctcacttcagagacaacgaatggaattttcaaagaggtgccgcttgtaccatcgatagatccttcggtactattgtcaaccacttgcaccaccacatcggcgattcccaccaatgtcaccacatgttctctcaaatgccattctacaatgctgtcgaagctactaagtatctaaaggccaagctaggtaagtactacatcttcgacgacactccaattgccaaggctttgtacagaaactggagagaatgtaaattcgtcgaagacgaaggtgatgttgttttctacaagcactaa

SEQ ID NO: 645 - DNA, 1212 bp, Artificial sequence
  Delta-15 Desaturase
atggcccctccacacgtcgtcgacgaacaagttagaagaagaatcgttgttgaagacgagattaagtcaaagaaacaattcgagagaaactacgtcccaatggatttcactatcaaggaaatcagagacgctatccctgctcacttattcatcagagacacaactaagtcaattctacacgttgtcaaagatttggttaccattgccattgttttctactgtgctaccttcatcgaaactttgccatccttggctttgagagttccagcatggatcacctactggattattcaaggtaccgtcatggttggtccatggattttggctcacgaatgtggtcacggtgccttttctgattccaagactatcaacactattttcggttgggtcttgcattccgctttgttggttccttatcaggcatgggcaatgtcacactctaagcaccacaagggtactggttccatgactaaggatgttgtcttcattccagctactagtacggacgaagatgtcccacccctagaaaagcctgctgttgaagaagaagtttctgaacaagaacatcaccaccatgaagaatccatctttgctgaaaccccaatctacactttgggtgccttgttgttcgttttaaccttcggttggccattgtacctaattgttaacttctctggtcacgaagccccacactgggtcaaccacttccaaactgttgctccattgtacgaaccacaccaaagaaagaacatcttttactctaactgtggtattgttgctatgggctctattttgacctatttgtccatggttttctctccattaactgttttcatgtactacggtatcccatacttgggtgttaatgcttggattgtttgcattacttacttacaacacactgatccaaaggttcctcacttcagagacaacgaatggaattttcaaagaggtgccgcttgtaccatcgatagatccttcggtactattgtcaaccacttgcaccaccacatcggcgattcccaccaatgtcaccacatgttctctcaaatgccattctacaatgctgtcgaagctactaagtatctaaaggccaagctaggtaagtactacatcttcgacgacactccaattgccaaggctttgtacagaaactggagagaatgtaaattcgtcgaagacgaaggtgatgttgttttctacaagcactaa

SEQ ID NO: 646 - DNA, 1212 bp, Artificial sequence
  Delta-15 Desaturase
atggcccctccacacgtcgtcgacgaacaagttagaagaagaatcgttgttgaagacgagattaagtcaaagaaacaattcgagagaaactacgtcccaatggatttcactatcaaggaaatcagagacgctatccctgctcacttattcatcagagacacaactaagtcaattctacacgttgtcaaagatttggttaccattgccattgttttctactgtgctaccttcatcgaaactttgccatccttggctttgagagttccagcatggatcacctactggattattcaaggtaccgtcatggttggtccatggattttggctcacgaatgtggtcacggtgccttttctgattccaagactatcaacactattttcggttgggtcttgcattccgctttgttggttccttatcaggcatgggcaatgtcacactctaagcaccacaagggtactggttccatgactaaggatgttgtcttcattccagctactgaagggtacaaaaatatcccagacctagaaaagcctgctgttgaagaagaagtttctgaacaagaacatcaccaccatgaagaatccatctttgctgaaaccccaatctacactttgggtgccttgttgttcgttttaaccttcggttggccattgtacctaattgttaacttctctggtcacgaagccccacactgggtcaaccacttccaaactgttgctccattgtacgaaccacaccaaagaaagaacatcttttactctaactgtggtattgttgctatgggctctattttgacctatttgtccatggttttctctccattaactgttttcatgtactacggtatcccatacttgggtgttaatgcttggattgtttgcattacttacttacaacacactgatccaaaggttcctcacttcagagacaacgaatggaattttcaaagaggtgccgcttgtaccatcgatagatccttcggtactattgtcaaccacttgcaccaccacatcggcgattcccaccaatgtcaccacatgttctctcaaatgccattctacaatgctgtcgaagctactaagtatctaaaggccaagctaggtaagtactacatcttcgacgacactccaattgccaaggctttgtacagaaactggagagaatgtaaattcgtcgaagacgaaggtgatgttgttttctacaagcactaa

SEQ ID NO: 647 - DNA, 1212 bp, Artificial sequence
  Delta-15 Desaturase
atggcccctccacacgtcgtcgacgaacaagttagaagaagaatcgttgttgaagacgagattaagtcaaagaaacaattcgagagaaactacgtcccaatggatttcactatcaaggaaatcagagacgctatccctgctcacttattcatcagagacacaactaagtcaattctacacgttgtcaaagatttggttaccattgccattgttttctactgtgctaccttcatcgaaactttgccatccttggctttgagagttccagcatggatcacctactggattattcaaggtaccgtcatggttggtccatggattttggctcacgaatgtggtcacggtgccttttctgattccaagactatcaacactattttcggttgggtcttgcattccgctttgttggttccttatcaggcatgggcaatgtcacactctaagcaccacaagggtactggttccatgactaaggatgttgtcttcattccagctactggagggtacgaaggtgtcccacacctagaaaagcctgctgttgaagaagaagtttctgaacaagaacatcaccaccatgaagaatccatctttgctgaaaccccaatctacactttgggtgccttgttgttcgttttaaccttcggttggccattgtacctaattgttaacttctctggtcacgaagccccacactgggtcaaccacttccaaactgttgctccattgtacgaaccacaccaaagaaagaacatcttttactctaactgtggtattgttgctatgggctctattttgacctatttgtccatggttttctctccattaactgttttcatgtactacggtatcccatacttgggtgttaatgcttggattgtttgcattacttacttacaacacactgatccaaaggttcctcacttcagagacaacgaatggaattttcaaagaggtgccgcttgtaccatcgatagatccttcggtactattgtcaaccacttgcaccaccacatcggcgattcccaccaatgtcaccacatgttctctcaaatgccattctacaatgctgtcgaagctactaagtatctaaaggccaagctaggtaagtactacatcttcgacgacactccaattgccaaggctttgtacagaaactggagagaatgtaaattcgtcgaagacgaaggtgatgttgttttctacaagcactaa

SEQ ID NO: 648 - DNA, 1212 bp, Artificial sequence
  Delta-15 Desaturase
atggcccctccacacgtcgtcgacgaacaagttagaagaagaatcgttgttgaagacgagattaagtcaaagaaacaattcgagagaaactacgtcccaatggatttcactatcaaggaaatcagagacgctatccctgctcacttattcatcagagacacaactaagtcaattctacacgttgtcaaagatttggttaccattgccattgttttctactgtgctaccttcatcgaaactttgccatccttggctttgagagttccagcatggatcacctactggattattcaaggtaccgtcatggttggtccatggattttggctcacgaatgtggtcacggtgccttttctgattccaagactatcaacactattttcggttgggtcttgcattccgctttgttggttccttatcaggcatgggcaatgtcacactctaagcaccacaagggtactggttccatgactaaggatgttgtcttcattccagctactagttggctcagagatgtccgagacctagaaaagcctgctgttgaagaagaagtttctgaacaagaacatcaccaccatgaagaatccatctttgctgaaaccccaatctacactttgggtgccttgttgttcgttttaaccttcggttggccattgtacctaattgttaacttctctggtcacgaagccccacactgggtcaaccacttccaaactgttgctccattgtacgaaccacaccaaagaaagaacatcttttactctaactgtggtattgttgctatgggctctattttgacctatttgtccatggttttctctccattaactgttttcatgtactacggtatcccatacttgggtgttaatgcttggattgtttgcattacttacttacaacacactgatccaaaggttcctcacttcagagacaacgaatggaattttcaaagaggtgccgcttgtaccatcgatagatccttcggtactattgtcaaccacttgcaccaccacatcggcgattcccaccaatgtcaccacatgttctctcaaatgccattctacaatgctgtcgaagctactaagtatctaaaggccaagctaggtaagtactacatcttcgacgacactccaattgccaaggctttgtacagaaactggagagaatgtaaattcgtcgaagacgaaggtgatgttgttttctacaagcactaa

SEQ ID NO: 649 - DNA, 1212 bp, Artificial sequence
  Delta-15 Desaturase
atggcccctccacacgtcgtcgacgaacaagttagaagaagaatcgttgttgaagacgagattaagtcaaagaaacaattcgagagaaactacgtcccaatggatttcactatcaaggaaatcagagacgctatccctgctcacttattcatcagagacacaactaagtcaattctacacgttgtcaaagatttggttaccattgccattgttttctactgtgctaccttcatcgaaactttgccatccttggctttgagagttccagcatggatcacctactggattattcaaggtaccgtcatggttggtccatggattttggctcacgaatgtggtcacggtgccttttctgattccaagactatcaacactattttcggttgggtcttgcattccgctttgttggttccttatcaggcatgggcaatgtcacactctaagcaccacaagggtactggttccatgactaaggatgttgtcttcattccagctactgatacgttcaaaagtgtccgaaacctagaaaagcctgctgttgaagaagaagtttctgaacaagaacatcaccaccatgaagaatccatctttgctgaaaccccaatctacactttgggtgccttgttgttcgttttaaccttcggttggccattgtacctaattgttaacttctctggtcacgaagccccacactgggtcaaccacttccaaactgttgctccattgtacgaaccacaccaaagaaagaacatcttttactctaactgtggtattgttgctatgggctctattttgacctatttgtccatggttttctctccattaactgttttcatgtactacggtatcccatacttgggtgttaatgcttggattgtttgcattacttacttacaacacactgatccaaaggttcctcacttcagagacaacgaatggaattttcaaagaggtgccgcttgtaccatcgatagatccttcggtactattgtcaaccacttgcaccaccacatcggcgattcccaccaatgtcaccacatgttctctcaaatgccattctacaatgctgtcgaagctactaagtatctaaaggccaagctaggtaagtactacatcttcgacgacactccaattgccaaggctttgtacagaaactggagagaatgtaaattcgtcgaagacgaaggtgatgttgttttctacaagcactaa

SEQ ID NO: 650 - DNA, 1212 bp, Artificial sequence
  Delta-15 Desaturase
atggcccctccacacgtcgtcgacgaacaagttagaagaagaatcgttgttgaagacgagattaagtcaaagaaacaattcgagagaaactacgtcccaatggatttcactatcaaggaaatcagagacgctatccctgctcacttattcatcagagacacaactaagtcaattctacacgttgtcaaagatttggttaccattgccattgttttctactgtgctaccttcatcgaaactttgccatccttggctttgagagttccagcatggatcacctactggattattcaaggtaccgtcatggttggtccatggattttggctcacgaatgtggtcacggtgccttttctgattccaagactatcaacactattttcggttgggtcttgcattccgctttgttggttccttatcaggcatgggcaatgtcacactctaagcaccacaagggtactggttccatgactaaggatgttgtcttcattccagctactcgttcctacaaaggtctacctgcccgagacaagctttacatggacgaagaagtttctgaacaagaacatcaccaccatgaagaatccatctttgctgaaaccccaatctacactttgggtgccttgttgttcgttttaaccttcggttggccattgtacctaattgttaacttctctggtcacgaagccccacactgggtcaaccacttccaaactgttgctccattgtacgaaccacaccaaagaaagaacatcttttactctaactgtggtattgttgctatgggctctattttgacctatttgtccatggttttctctccattaactgttttcatgtactacggtatcccatacttgggtgttaatgcttggattgtttgcattacttacttacaacacactgatccaaaggttcctcacttcagagacaacgaatggaattttcaaagaggtgccgcttgtaccatcgatagatccttcggtactattgtcaaccacttgcaccaccacatcggcgattcccaccaatgtcaccacatgttctctcaaatgccattctacaatgctgtcgaagctactaagtatctaaaggccaagctaggtaagtactacatcttcgacgacactccaattgccaaggctttgtacagaaactggagagaatgtaaattcgtcgaagacgaaggtgatgttgttttctacaagcactaa

SEQ ID NO: 651 - DNA, 1212 bp, Artificial sequence
  Delta-15 Desaturase
atggcccctccacacgtcgtcgacgaacaagttagaagaagaatcgttgttgaagacgagattaagtcaaagaaacaattcgagagaaactacgtcccaatggatttcactatcaaggaaatcagagacgctatccctgctcacttattcatcagagacacaactaagtcaattctacacgttgtcaaagatttggttaccattgccattgttttctactgtgctaccttcatcgaaactttgccatccttggctttgagagttccagcatggatcacctactggattattcaaggtaccgtcatggttggtccatggattttggctcacgaatgtggtcacggtgccttttctcaacccaggtggttcaacaccattatgggttgggtcttgcattccgctttgttggttccttatcaggcatgggcaatgtcacactctaagcaccacaagggtactggtagtatgtcgaaggatgtggtcttcattccagctactcgttcctacaaaggtctacctgccctagaaaagcctgctgttgaagaagaagtttctgaacaagaacatcaccaccatgaagaatccatctttgctgaaaccccaatctacactttgggtgccttgttgttcgttttaaccttcggttggccattgtacctaattgttaacttctctggtcacgaagccccacactgggtcaaccacttccaaactgttgctccattgtacgaaccacaccaaagaaagaacatcttttactctaactgtggtattgttgctatgggctctattttgacctatttgtccatggttttctctccattaactgttttcatgtactacggtatcccatacttgggtgttaatgcttggattgtttgcattacttacttacaacacactgatccaaaggttcctcacttcagagacaacgaatggaattttcaaagaggtgccgcttgtaccatcgatagatccttcggtactattgtcaaccacttgcaccaccacatcggcgattcccaccaatgtcaccacatgttctctcaaatgccattctacaatgctgtcgaagctactaagtatctaaaggccaagctaggtaagtactacatcttcgacgacactccaattgccaaggctttgtacagaaactggagagaatgtaaattcgtcgaagacgaaggtgatgttgttttctacaagcactaa

SEQ ID NO: 652 - DNA, 1212 bp, Artificial sequence
  Delta-15 Desaturase
atggcccctccacacgtcgtcgacgaacaagttagaagaagaatcgttgttgaagacgagattaagtcaaagaaacaattcgagagaaactacgtcccaatggatttcactatcaaggaaatcagagacgctatccctgctcacttattcatcagagacacaactaagtcaattctacacgttgtcaaagatttggttaccattgccattgttttctactgtgctaccttcatcgaaactttgccatccttggctttgagagttccagcatggatcacctactggattattcaaggtaccgtcatggttggtccatggattttggctcacgaatgtggtcacggtgccttttctaaacccaggtggttcaactacattttgggttgggtcttgcattccgctttgttggttccttatcaggcatgggcaatgtcacactctaagcaccacaagggtactggttccatgactaaggatgttgtcttcattccagctactcgttcctacaaaggtctacctgccctagaaaagcctgctgttgaagaagaagtttctgaacaagaacatcaccaccatgaagaatccatctttgctgaaaccccaatctacactttgggtgccttgttgttcgttttaaccttcggttggccattgtacctaattgttaacttctctggtcacgaagccccacactgggtcaaccacttccaaactgttgctccattgtacgaaccacaccaaagaaagaacatcttttactctaactgtggtattgttgctatgggctctattttgacctatttgtccatggttttctctccattaactgttttcatgtactacggtatcccatacttgggtgttaatgcttggattgtttgcattacttacttacaacacactgatccaaaggttcctcacttcagagacaacgaatggaattttcaaagaggtgccgcttgtaccatcgatagatccttcggtactattgtcaaccacttgcaccaccacatcggcgattcccaccaatgtcaccacatgttctctcaaatgccattctacaatgctgtcgaagctactaagtatctaaaggccaagctaggtaagtactacatcttcgacgacactccaattgccaaggctttgtacagaaactggagagaatgtaaattcgtcgaagacgaaggtgatgttgttttctacaagcactaa

SEQ ID NO: 653 - DNA, 1212 bp, Artificial sequence
  Delta-15 Desaturase
atggcccctccacacgtcgtcgacgaacaagttagaagaagaatcgttgttgaagacgagattaagtcaaagaaacaattcgagagaaactacgtcccaatggatttcactatcaaggaaatcagagacgctatccctgctcacttattcatcagagacacaactaagtcaattctacacgttgtcaaagatttggttaccattgccattgttttctactgtgctaccttcatcgaaactttgccatccttggctttgagagttccagcatggatcacctactggattattcaaggtaccgtcatggttggtccatggattttggctcacgaatgtggtcacggtgccttttctaaatacaagtggatcaacaccattttcggttgggtcttgcattccgctttgttggttccttatcaggcatgggcaatgtcacactctaagcaccacaaggctactggtagtatggcgaaggatatggtcttcattccagctactcgttcctacaaaggtctacctgccctagaaaagcctgctgttgaagaagaagtttctgaacaagaacatcaccaccatgaagaatccatctttgctgaaaccccaatctacactttgggtgccttgttgttcgttttaaccttcggttggccattgtacctaattgttaacttctctggtcacgaagccccacactgggtcaaccacttccaaactgttgctccattgtacgaaccacaccaaagaaagaacatcttttactctaactgtggtattgttgctatgggctctattttgacctatttgtccatggttttctctccattaactgttttcatgtactacggtatcccatacttgggtgttaatgcttggattgtttgcattacttacttacaacacactgatccaaaggttcctcacttcagagacaacgaatggaattttcaaagaggtgccgcttgtaccatcgatagatccttcggtactattgtcaaccacttgcaccaccacatcggcgattcccaccaatgtcaccacatgttctctcaaatgccattctacaatgctgtcgaagctactaagtatctaaaggccaagctaggtaagtactacatcttcgacgacactccaattgccaaggctttgtacagaaactggagagaatgtaaattcgtcgaagacgaaggtgatgttgttttctacaagcactaa

SEQ ID NO: 654 - DNA, 1212 bp, Artificial sequence
  Delta-15 Desaturase
atggcccctccacacgtcgtcgacgaacaagttagaagaagaatcgttgttgaagacgagattaagtcaaagaaacaattcgagagaaactacgtcccaatggatttcactatcaaggaaatcagagacgctatccctgctcacttattcatcagagacacaactaagtcaattctacacgttgtcaaagatttggttaccattgccattgttttctactgtgctaccttcatcgaaactttgccatccttggctttgagagttccagcatggatcacctactggattattcaaggtaccgtcatggttggtccatggattttggctcacgaatgtggtcacggtgccttttctgactccacgacgttcaactccattttcggttgggtcttgcattccgctttgttggttccttatcaggcatgggcaatgtcacactctaagcaccacaagggtactggttccatgactaaggatgttgtcttcattccagctactcgttcctacaaaggtctacctgccctagaaaagcctgctgttgaagaagaagtttctgaacaagaacatcaccaccatgaagaatccatctttgctgaaaccccaatctacactttgggtgccttgttgttcgttttaaccttcggttggccattgtacctaattgttaacttctctggtcacgaagccccacactgggtcaaccacttccaaactgttgctccattgtacgaaccacaccaaagaaagaacatcttttactctaactgtggtattgttgctatgggctctattttgacctatttgtccatggttttctctccattaactgttttcatgtactacggtatcccatacttgggtgttaatgcttggattgtttgcattacttacttacaacacactgatccaaaggttcctcacttcagagacaacgaatggaattttcaaagaggtgccgcttgtaccatcgatagatccttcggtactattgtcaaccacttgcaccaccacatcggcgattcccaccaatgtcaccacatgttctctcaaatgccattctacaatgctgtcgaagctactaagtatctaaaggccaagctaggtaagtactacatcttcgacgacactccaattgccaaggctttgtacagaaactggagagaatgtaaattcgtcgaagacgaaggtgatgttgttttctacaagcactaa

SEQ ID NO: 655 - DNA, 1212 bp, Artificial sequence
  Delta-15 Desaturase
atggcccctccacacgtcgtcgacgaacaagttagaagaagaatcgttgttgaagacgagattaagtcaaagaaacaattcgagagaaactacgtcccaatggatttcactatcaaggaaatcagagacgctatccctgctcacttattcatcagagacacaactaagtcaattctacacgttgtcaaagatttggttaccattgccattgttttctactgtgctaccttcatcgaaactttgccatccttggctttgagagttccagcatggatcacctactggattattcaaggtaccgtcatggttggtccatggattttggctcacgaatgtggtcacggtgccttttctcaacacacgacgatcaactccattttgggttgggtcttgcattccgctttgttggttccttatcaggcatgggcaatgtcacactctaagcaccacaagggtactggttccatgactaaggatgttgtcttcattccagctactcgttcctacaaaggtctacctgccctagaaaagcctgctgttgaagaagaagtttctgaacaagaacatcaccaccatgaagaatccatctttgctgaaaccccaatctacactttgggtgccttgttgttcgttttaaccttcggttggccattgtacctaattgttaacttctctggtcacgaagccccacactgggtcaaccacttccaaactgttgctccattgtacgaaccacaccaaagaaagaacatcttttactctaactgtggtattgttgctatgggctctattttgacctatttgtccatggttttctctccattaactgttttcatgtactacggtatcccatacttgggtgttaatgcttggattgtttgcattacttacttacaacacactgatccaaaggttcctcacttcagagacaacgaatggaattttcaaagaggtgccgcttgtaccatcgatagatccttcggtactattgtcaaccacttgcaccaccacatcggcgattcccaccaatgtcaccacatgttctctcaaatgccattctacaatgctgtcgaagctactaagtatctaaaggccaagctaggtaagtactacatcttcgacgacactccaattgccaaggctttgtacagaaactggagagaatgtaaattcgtcgaagacgaaggtgatgttgttttctacaagcactaa

SEQ ID NO: 656 - DNA, 1212 bp, Artificial sequence
  Delta-15 Desaturase
atggcccctccacacgtcgtcgacgaacaagttagaagaagaatcgttgttgaagacgagattaagtcaaagaaacaattcgagagaaactacgtcccaatggatttcactatcaaggaaatcagagacgctatccctgctcacttattcatcagagacacaactaagtcaattctacacgttgtcaaagatttggttaccattgccattgttttctactgtgctaccttcatcgaaactttgccatccttggctttgagagttccagcatggatcacctactggattattcaaggtaccgtcatggttggtccatggattttggctcacgaatgtggtcacggtgccttttctaaacacacgtggttcaacaccattatcggttgggtcttgcattccgctttgttggttccttatcaggcatgggcaatgtcacactctaagcaccacaaggctactggtcatatggcgaaggatgtcgtcttcattccagctactcgttcctacaaaggtctacctgccctagaaaagcctgctgttgaagaagaagtttctgaacaagaacatcaccaccatgaagaatccatctttgctgaaaccccaatctacactttgggtgccttgttgttcgttttaaccttcggttggccattgtacctaattgttaacttctctggtcacgaagccccacactgggtcaaccacttccaaactgttgctccattgtacgaaccacaccaaagaaagaacatcttttactctaactgtggtattgttgctatgggctctattttgacctatttgtccatggttttctctccattaactgttttcatgtactacggtatcccatacttgggtgttaatgcttggattgtttgcattacttacttacaacacactgatccaaaggttcctcacttcagagacaacgaatggaattttcaaagaggtgccgcttgtaccatcgatagatccttcggtactattgtcaaccacttgcaccaccacatcggcgattcccaccaatgtcaccacatgttctctcaaatgccattctacaatgctgtcgaagctactaagtatctaaaggccaagctaggtaagtactacatcttcgacgacactccaattgccaaggctttgtacagaaactggagagaatgtaaattcgtcgaagacgaaggtgatgttgttttctacaagcactaa

SEQ ID NO: 657 - DNA, 1212 bp, Artificial sequence
  Delta-15 Desaturase
atggcccctccacacgtcgtcgacgaacaagttagaagaagaatcgttgttgaagacgagattaagtcaaagaaacaattcgagagaaactacgtcccaatggatttcactatcaaggaaatcagagacgctatccctgctcacttattcatcagagacacaactaagtcaattctacacgttgtcaaagatttggttaccattgccattgttttctactgtgctaccttcatcgaaactttgccatccttggctttgagagttccagcatggatcacctactggattattcaaggtaccgtcatggttggtccatggattttggctcacgaatgtggtcacggtgccttttctcattacaagtggttcaacaccattttgggttgggtcttgcattccgctttgttggttccttatcaggcatgggcaatgtcacactctaagcaccacaagtctactggtaatatgaagaaggatttggtcttcattccagctactcgttcctacaaaggtctacctgccctagaaaagcctgctgttgaagaagaagtttctgaacaagaacatcaccaccatgaagaatccatctttgctgaaaccccaatctacactttgggtgccttgttgttcgttttaaccttcggttggccattgtacctaattgttaacttctctggtcacgaagccccacactgggtcaaccacttccaaactgttgctccattgtacgaaccacaccaaagaaagaacatcttttactctaactgtggtattgttgctatgggctctattttgacctatttgtccatggttttctctccattaactgttttcatgtactacggtatcccatacttgggtgttaatgcttggattgtttgcattacttacttacaacacactgatccaaaggttcctcacttcagagacaacgaatggaattttcaaagaggtgccgcttgtaccatcgatagatccttcggtactattgtcaaccacttgcaccaccacatcggcgattcccaccaatgtcaccacatgttctctcaaatgccattctacaatgctgtcgaagctactaagtatctaaaggccaagctaggtaagtactacatcttcgacgacactccaattgccaaggctttgtacagaaactggagagaatgtaaattcgtcgaagacgaaggtgatgttgttttctacaagcactaa

SEQ ID NO: 658 - DNA, 1212 bp, Artificial sequence
  Delta-15 Desaturase
atggcccctccacacgtcgtcgacgaacaagttagaagaagaatcgttgttgaagacgagattaagtcaaagaaacaattcgagagaaactacgtcccaatggatttcactatcaaggaaatcagagacgctatccctgctcacttattcatcagagacacaactaagtcaattctacacgttgtcaaagatttggttaccattgccattgttttctactgtgctaccttcatcgaaactttgccatccttggctttgagagttccagcatggatcacctactggattattcaaggtaccgtcatggttggtccatggattttggctcacgaatgtggtcacggtgcctttgctaaatccacgtggttcaactccattttcggttgggtcttgcattccgctttgttggttccttatcaggcatgggcaatgtcacactctaagcaccacaaggatactggtaatatggagaaggatgtggtcttcattccagctactcgttcctacaaaggtctacctgccctagaaaagcctgctgttgaagaagaagtttctgaacaagaacatcaccaccatgaagaatccatctttgctgaaaccccaatctacactttgggtgccttgttgttcgttttaaccttcggttggccattgtacctaattgttaacttctctggtcacgaagccccacactgggtcaaccacttccaaactgttgctccattgtacgaaccacaccaaagaaagaacatcttttactctaactgtggtattgttgctatgggctctattttgacctatttgtccatggttttctctccattaactgttttcatgtactacggtatcccatacttgggtgttaatgcttggattgtttgcattacttacttacaacacactgatccaaaggttcctcacttcagagacaacgaatggaattttcaaagaggtgccgcttgtaccatcgatagatccttcggtactattgtcaaccacttgcaccaccacatcggcgattcccaccaatgtcaccacatgttctctcaaatgccattctacaatgctgtcgaagctactaagtatctaaaggccaagctaggtaagtactacatcttcgacgacactccaattgccaaggctttgtacagaaactggagagaatgtaaattcgtcgaagacgaaggtgatgttgttttctacaagcactaa

SEQ ID NO: 659 - DNA, 1212 bp, Artificial sequence
  Delta-15 Desaturase
atggcccctccacacgtcgtcgacgaacaagttagaagaagaatcgttgttgaagacgagattaagtcaaagaaacaattcgagagaaactacgtcccaatggatttcactatcaaggaaatcagagacgctatccctgctcacttattcatcagagacacaactaagtcaattctacacgttgtcaaagatttggttaccattgccattgttttctactgtgctaccttcatcgaaactttgccatccttggctttgagagttccagcatggatcacctactggattattcaaggtaccgtcatggttggtccatggattttggctcacgaatgtggtcacggtgccttttctgaatacaagacgatcaactccattatcggttgggtcttgcattccgctttgttggttccttatcaggcatgggcaatgtcacactctaagcaccacaagggtactggttccatgactaaggatgttgtcttcattccagctactcgttcctacaaaggtctacctgccctagaaaagcctgctgttgaagaagaagtttctgaacaagaacatcaccaccatgaagaatccatctttgctgaaaccccaatctacactttgggtgccttgttgttcgttttaaccttcggttggccattgtacctaattgttaacttctctggtcacgaagccccacactgggtcaaccacttccaaactgttgctccattgtacgaaccacaccaaagaaagaacatcttttactctaactgtggtattgttgctatgggctctattttgacctatttgtccatggttttctctccattaactgttttcatgtactacggtatcccatacttgggtgttaatgcttggattgtttgcattacttacttacaacacactgatccaaaggttcctcacttcagagacaacgaatggaattttcaaagaggtgccgcttgtaccatcgatagatccttcggtactattgtcaaccacttgcaccaccacatcggcgattcccaccaatgtcaccacatgttctctcaaatgccattctacaatgctgtcgaagctactaagtatctaaaggccaagctaggtaagtactacatcttcgacgacactccaattgccaaggctttgtacagaaactggagagaatgtaaattcgtcgaagacgaaggtgatgttgttttctacaagcactaa

SEQ ID NO: 660 - DNA, 1212 bp, Artificial sequence
  Delta-15 Desaturase
atggcccctccacacgtcgtcgacgaacaagttagaagaagaatcgttgttgaagacgagattaagtcaaagaaacaattcgagagaaactacgtcccaatggatttcactatcaaggaaatcagagacgctatccctgctcacttattcatcagagacacaactaagtcaattctacacgttgtcaaagatttggttaccattgccattgttttctactgtgctaccttcatcgaaactttgccatccttggctttgagagttccagcatggatcacctactggattattcaaggtaccgtcatggttggtccatggattttggctcacgaatgtggtcacggtgccttttctaaacccaagtggttcaacaccattttgggttgggtcttgcattccgctttgttggttccttatcaggcatgggcaatgtcacactctaagcaccacaagggtactggttccatgactaaggatgttgtcttcattccagctactcgttcctacaaaggtctacctgccctagaaaagcctgctgttgaagaagaagtttctgaacaagaacatcaccaccatgaagaatccatctttgctgaaaccccaatctacactttgggtgccttgttgttcgttttaaccttcggttggccattgtacctaattgttaacttctctggtcacgaagccccacactgggtcaaccacttccaaactgttgctccattgtacgaaccacaccaaagaaagaacatcttttactctaactgtggtattgttgctatgggctctattttgacctatttgtccatggttttctctccattaactgttttcatgtactacggtatcccatacttgggtgttaatgcttggattgtttgcattacttacttacaacacactgatccaaaggttcctcacttcagagacaacgaatggaattttcaaagaggtgccgcttgtaccatcgatagatccttcggtactattgtcaaccacttgcaccaccacatcggcgattcccaccaatgtcaccacatgttctctcaaatgccattctacaatgctgtcgaagctactaagtatctaaaggccaagctaggtaagtactacatcttcgacgacactccaattgccaaggctttgtacagaaactggagagaatgtaaattcgtcgaagacgaaggtgatgttgttttctacaagcactaa

SEQ ID NO: 661 - DNA, 1212 bp, Artificial sequence
  Delta-15 Desaturase
atggcccctccacacgtcgtcgacgaacaagttagaagaagaatcgttgttgaagacgagattaagtcaaagaaacaattcgagagaaactacgtcccaatggatttcactatcaaggaaatcagagacgctatccctgctcacttattcatcagagacacaactaagtcaattctacacgttgtcaaagatttggttaccattgccattgttttctactgtgctaccttcatcgaaactttgccatccttggctttgagagttccagcatggatcacctactggattattcaaggtaccgtcatggttggtccatggattttggctcacgaatgtggtcacggtgccttttctgattccaagactatcaacactattttcggttgggtcttgcattccgctttgttggttccttatcaggcatgggcaatgtcacactctaagcaccacaagggtactggttccatgactaaggatgttgtcttcattccagctactcgttcctacaaaggtctacctgccctagaaaagcctgctgttgaagaagaagtttctgaacaagaacatcaccaccatgaagaatccatctttgctgaaaccccaatctacattttgatcacgttcttcttcgtcctgaccttcggttggccattgtacctaattgttaacttctctggtcacgaagccccacactgggtcaaccacttccaaactgttgctccattgtacgaaccacaccaaagaaagaacatcttttactctaactgtggtattgttgctatgggctctattttgacctatttgtccatggttttctctccattaactgttttcatgtactacggtatcccatacttgggtgttaatgcttggattgtttgcattacttacttacaacacactgatccaaaggttcctcacttcagagacaacgaatggaattttcaaagaggtgccgcttgtaccatcgatagatccttcggtactattgtcaaccacttgcaccaccacatcggcgattcccaccaatgtcaccacatgttctctcaaatgccattctacaatgctgtcgaagctactaagtatctaaaggccaagctaggtaagtactacatcttcgacgacactccaattgccaaggctttgtacagaaactggagagaatgtaaattcgtcgaagacgaaggtgatgttgttttctacaagcactaa

SEQ ID NO: 662 - DNA, 1212 bp, Artificial sequence
  Delta-15 Desaturase
atggcccctccacacgtcgtcgacgaacaagttagaagaagaatcgttgttgaagacgagattaagtcaaagaaacaattcgagagaaactacgtcccaatggatttcactatcaaggaaatcagagacgctatccctgctcacttattcatcagagacacaactaagtcaattctacacgttgtcaaagatttggttaccattgccattgttttctactgtgctaccttcatcgaaactttgccatccttggctttgagagttccagcatggatcacctactggattattcaaggtaccgtcatggttggtccatggattttggctcacgaatgtggtcacggtgccttttctgattccaagactatcaacactattttcggttgggtcttgcattccgctttgttggttccttatcaggcatgggcaatgtcacactctaagcaccacaagggtactggttccatgactaaggatgttgtcttcattccagctactcgttcctacaaaggtctacctgccctagaaaagcctgctgttgaagaagaagtttctgaacaagaacatcaccaccatgaagaatccatctttgctgaaaccccaatctacactttggtcacgttcatcatcgtcctgaccttcggttggccattgtacctaattgttaacttctctggtcacgaagccccacactgggtcaaccacttccaaactgttgctccattgtacgaaccacaccaaagaaagaacatcttttactctaactgtggtattgttgctatgggctctattttgacctatttgtccatggttttctctccattaactgttttcatgtactacggtatcccatacttgggtgttaatgcttggattgtttgcattacttacttacaacacactgatccaaaggttcctcacttcagagacaacgaatggaattttcaaagaggtgccgcttgtaccatcgatagatccttcggtactattgtcaaccacttgcaccaccacatcggcgattcccaccaatgtcaccacatgttctctcaaatgccattctacaatgctgtcgaagctactaagtatctaaaggccaagctaggtaagtactacatcttcgacgacactccaattgccaaggctttgtacagaaactggagagaatgtaaattcgtcgaagacgaaggtgatgttgttttctacaagcactaa

SEQ ID NO: 663 - protein, 403 aa, Artificial sequence
  Delta-15 Desaturase
MAPPHVVDEQVRRRIVVEDEIKSKKQFERNYVPMDFTIKEIRDAIPAHLFIRDTTKSILHVVKDLVTIAIVFYCATFIETLPSLALRVPAWITYWIIQGTVMVGPWILAHECGHGAFSKYRTFNYIFGWVLHSALLVPYQAWAMSHSKHHKGTGSMTKDVVFIPATRSYKGLPALEKPAVEEEVSEQEHHHHEESIFAETPIYTLGALLFVLTFGWPLYLIVNFSGHEAPHWVNHFQTVAPLYEPHQRKNIFYSNCGIVAMGSILTYLSMVFSPLTVFMYYGIPYLGVNAWIVCITYLQHTDPKVPHFRDNEWNFQRGAACTIDRSFGTIVNHLHHHIGDSHQCHHMFSQMPFYNAVEATKYLKAKLGKYYIFDDTPIAKALYRNWRECKFVEDEGDVVFYKH

SEQ ID NO: 664 - protein, 403 aa, Artificial sequence
  Delta-15 Desaturase
MAPPHVVDEQVRRRIVVEDEIKSKKQFERNYVPMDFTIKEIRDAIPAHLFIRDTTKSILHVVKDLVTIAIVFYCATFIETLPSLALRVPAWITYWIIQGTVMVGPWILAHECGHGAFSQHKSFNYIIGWVLHSALLVPYQAWAMSHSKHHKGTGSMTKDVVFIPATRSYKGLPALEKPAVEEEVSEQEHHHHEESIFAETPIYTLGALLFVLTFGWPLYLIVNFSGHEAPHWVNHFQTVAPLYEPHQRKNIFYSNCGIVAMGSILTYLSMVFSPLTVFMYYGIPYLGVNAWIVCITYLQHTDPKVPHFRDNEWNFQRGAACTIDRSFGTIVNHLHHHIGDSHQCHHMFSQMPFYNAVEATKYLKAKLGKYYIFDDTPIAKALYRNWRECKFVEDEGDVVFYKH

SEQ ID NO: 665 - protein, 403 aa, Artificial sequence
  Delta-15 Desaturase
MAPPHVVDEQVRRRIVVEDEIKSKKQFERNYVPMDFTIKEIRDAIPAHLFIRDTTKSILHVVKDLVTIAIVFYCATFIETLPSLALRVPAWITYWIIQGTVMVGPWILAHECGHGAFSQYKWINNIFGWVLHSALLVPYQAWAMSHSKHHKGTGSMTKDVVFIPATRSYKGLPALEKPAVEEEVSEQEHHHHEESIFAETPIYTLGALLFVLTFGWPLYLIVNFSGHEAPHWVNHFQTVAPLYEPHQRKNIFYSNCGIVAMGSILTYLSMVFSPLTVFMYYGIPYLGVNAWIVCITYLQHTDPKVPHFRDNEWNFQRGAACTIDRSFGTIVNHLHHHIGDSHQCHHMFSQMPFYNAVEATKYLKAKLGKYYIFDDTPIAKALYRNWRECKFVEDEGDVVFYKH

SEQ ID NO: 666 - protein, 403 aa, Artificial sequence
  Delta-15 Desaturase
MAPPHVVDEQVRRRIVVEDEIKSKKQFERNYVPMDFTIKEIRDAIPAHLFIRDTTKSILHVVKDLVTIAIVFYCATFIETLPSLALRVPAWITYWIIQGTVMVGPWILAHECGHGAFSKYKTFNSILGWVLHSALLVPYQAWAMSHSKHHKGTGSMTKDIVFIPATRSYKGLPALEKPAVEEEVSEQEHHHHEESIFAETPIYTLGALLFVLTFGWPLYLIVNFSGHEAPHWVNHFQTVAPLYEPHQRKNIFYSNCGIVAMGSILTYLSMVFSPLTVFMYYGIPYLGVNAWIVCITYLQHTDPKVPHFRDNEWNFQRGAACTIDRSFGTIVNHLHHHIGDSHQCHHMFSQMPFYNAVEATKYLKAKLGKYYIFDDTPIAKALYRNWRECKFVEDEGDVVFYKH

SEQ ID NO: 667 - protein, 403 aa, Artificial sequence
  Delta-15 Desaturase
MAPPHVVDEQVRRRIVVEDEIKSKKQFERNYVPMDFTIKEIRDAIPAHLFIRDTTKSILHVVKDLVTIAIVFYCATFIETLPSLALRVPAWITYWIIQGTVMVGPWILAHECGHGAFSESKWINSIFGWVLHSALLVPYQAWAMSHSKHHKGTGSMTKDVVFIPATRSYKGLPALEKPAVEEEVSEQEHHHHEESIFAETPIYTLGALLFVLTFGWPLYLIVNFSGHEAPHWVNHFQTVAPLYEPHQRKNIFYSNCGIVAMGSILTYLSMVFSPLTVFMYYGIPYLGVNAWIVCITYLQHTDPKVPHFRDNEWNFQRGAACTIDRSFGTIVNHLHHHIGDSHQCHHMFSQMPFYNAVEATKYLKAKLGKYYIFDDTPIAKALYRNWRECKFVEDEGDVVFYKH

SEQ ID NO: 668 - protein, 403 aa, Artificial sequence
  Delta-15 Desaturase
MAPPHVVDEQVRRRIVVEDEIKSKKQFERNYVPMDFTIKEIRDAIPAHLFIRDTTKSILHVVKDLVTIAIVFYCATFIETLPSLALRVPAWITYWIIQGTVMVGPWILAHECGHGAFSKHTTFNYIIGWVLHSALLVPYQAWAMSHSKHHKGTGSMTKDVVFIPATRSYKGLPALEKPAVEEEVSEQEHHHHEESIFAETPIYTLGALLFVLTFGWPLYLIVNFSGHEAPHWVNHFQTVAPLYEPHQRKNIFYSNCGIVAMGSILTYLSMVFSPLTVFMYYGIPYLGVNAWIVCITYLQHTDPKVPHFRDNEWNFQRGAACTIDRSFGTIVNHLHHHIGDSHQCHHMFSQMPFYNAVEATKYLKAKLGKYYIFDDTPIAKALYRNWRECKFVEDEGDVVFYKH

SEQ ID NO: 669 - protein, 403 aa, Artificial sequence
  Delta-15 Desaturase
MAPPHVVDEQVRRRIVVEDEIKSKKQFERNYVPMDFTIKEIRDAIPAHLFIRDTTKSILHVVKDLVTIAIVFYCATFIETLPSLALRVPAWITYWIIQGTVMVGPWILAHECGHGAFSEPKSINYIFGWVLHSALLVPYQAWAMSHSKHHKGTGSMTKDVVFIPATRSYKGLPALEKPAVEEEVSEQEHHHHEESIFAETPIYTLGALLFVLTFGWPLYLIVNFSGHEAPHWVNHFQTVAPLYEPHQRKNIFYSNCGIVAMGSILTYLSMVFSPLTVFMYYGIPYLGVNAWIVCITYLQHTDPKVPHFRDNEWNFQRGAACTIDRSFGTIVNHLHHHIGDSHQCHHMFSQMPFYNAVEATKYLKAKLGKYYIFDDTPIAKALYRNWRECKFVEDEGDVVFYKH

SEQ ID NO: 670 - protein, 403 aa, Artificial sequence
  Delta-15 Desaturase
MAPPHVVDEQVRRRIVVEDEIKSKKQFERNYVPMDFTIKEIRDAIPAHLFIRDTTKSILHVVKDLVTIAIVFYCATFIETLPSLALRVPAWITYWIIQGTVMVGPWILAHECGHGAFSKYTRFNTIFGWVLHSALLVPYQAWAMSHSKHHKGTGSMTKDVVFIPATRSYKGLPALEKPAVEEEVSEQEHHHHEESIFAETPIYTLGALLFVLTFGWPLYLIVNFSGHEAPHWVNHFQTVAPLYEPHQRKNIFYSNCGIVAMGSILTYLSMVFSPLTVFMYYGIPYLGVNAWIVCITYLQHTDPKVPHFRDNEWNFQRGAACTIDRSFGTIVNHLHHHIGDSHQCHHMFSQMPFYNAVEATKYLKAKLGKYYIFDDTPIAKALYRNWRECKFVEDEGDVVFYKH

SEQ ID NO: 671 - protein, 403 aa, Artificial sequence
  Delta-15 Desaturase
MAPPHVVDEQVRRRIVVEDEIKSKKQFERNYVPMDFTIKEIRDAIPAHLFIRDTTKSILHVVKDLVTIAIVFYCATFIETLPSLALRVPAWITYWIIQGTVMVGPWILAHECGHGAFSNSRTFNYIIGWVLHSALLVPYQAWAMSHSKHHKGTGSMTKDVVFIPATRSYKGLPALEKPAVEEEVSEQEHHHHEESIFAETPIYTLGALLFVLTFGWPLYLIVNFSGHEAPHWVNHFQTVAPLYEPHQRKNIFYSNCGIVAMGSILTYLSMVFSPLTVFMYYGIPYLGVNAWIVCITYLQHTDPKVPHFRDNEWNFQRGAACTIDRSFGTIVNHLHHHIGDSHQCHHMFSQMPFYNAVEATKYLKAKLGKYYIFDDTPIAKALYRNWRECKFVEDEGDVVFYKH

SEQ ID NO: 672 - protein, 403 aa, Artificial sequence
  Delta-15 Desaturase
MAPPHVVDEQVRRRIVVEDEIKSKKQFERNYVPMDFTIKEIRDAIPAHLFIRDTTKSILHVVKDLVTIAIVFYCATFIETLPSLALRVPAWITYWIIQGTVMVGPWILAHECGHGAFSNSRWINTILGWVLHSALLVPYQAWAMSHSKHHKGTGSMTKDVVFIPATRSYKGLPALEKPAVEEEVSEQEHHHHEESIFAETPIYTLGALLFVLTFGWPLYLIVNFSGHEAPHWVNHFQTVAPLYEPHQRKNIFYSNCGIVAMGSILTYLSMVFSPLTVFMYYGIPYLGVNAWIVCITYLQHTDPKVPHFRDNEWNFQRGAACTIDRSFGTIVNHLHHHIGDSHQCHHMFSQMPFYNAVEATKYLKAKLGKYYIFDDTPIAKALYRNWRECKFVEDEGDVVFYKH

SEQ ID NO: 673 - protein, 403 aa, Artificial sequence
  Delta-15 Desaturase
MAPPHVVDEQVRRRIVVEDEIKSKKQFERNYVPMDFTIKEIRDAIPAHLFIRDTTKSILHVVKDLVTIAIVFYCATFIETLPSLALRVPAWITYWIIQGTVMVGPWILAHECGHGAFSQPTTINTIIGWVLHSALLVPYQAWAMSHSKHHKGTGSMTKDVVFIPATRSYKGLPALEKPAVEEEVSEQEHHHHEESIFAETPIYTLGALLFVLTFGWPLYLIVNFSGHEAPHWVNHFQTVAPLYEPHQRKNIFYSNCGIVAMGSILTYLSMVFSPLTVFMYYGIPYLGVNAWIVCITYLQHTDPKVPHFRDNEWNFQRGAACTIDRSFGTIVNHLHHHIGDSHQCHHMFSQMPFYNAVEATKYLKAKLGKYYIFDDTPIAKALYRNWRECKFVEDEGDVVFYKH

SEQ ID NO: 674 - protein, 403 aa, Artificial sequence
  Delta-15 Desaturase
MAPPHVVDEQVRRRIVVEDEIKSKKQFERNYVPMDFTIKEIRDAIPAHLFIRDTTKSILHVVKDLVTIAIVFYCATFIETLPSLALRVPAWITYWIIQGTVMVGPWILAHECGHGAFSKHKTFNSIIGWVLHSALLVPYQAWAMSHSKHHKGTGSMTKDVVFIPATRSYKGLPALEKPAVEEEVSEQEHHHHEESIFAETPIYTLGALLFVLTFGWPLYLIVNFSGHEAPHWVNHFQTVAPLYEPHQRKNIFYSNCGIVAMGSILTYLSMVFSPLTVFMYYGIPYLGVNAWIVCITYLQHTDPKVPHFRDNEWNFQRGAACTIDRSFGTIVNHLHHHIGDSHQCHHMFSQMPFYNAVEATKYLKAKLGKYYIFDDTPIAKALYRNWRECKFVEDEGDVVFYKH

SEQ ID NO: 675 - protein, 403 aa, Artificial sequence
  Delta-15 Desaturase
MAPPHVVDEQVRRRIVVEDEIKSKKQFERNYVPMDFTIKEIRDAIPAHLFIRDTTKSILHVVKDLVTIAIVFYCATFIETLPSLALRVPAWITYWIIQGTVMVGPWILAHECGHGAFSQHKSINYIFGWVLHSALLVPYQAWAMSHSKHHKGTGSMTKDVVFIPATRSYKGLPALEKPAVEEEVSEQEHHHHEESIFAETPIYTLGALLFVLTFGWPLYLIVNFSGHEAPHWVNHFQTVAPLYEPHQRKNIFYSNCGIVAMGSILTYLSMVFSPLTVFMYYGIPYLGVNAWIVCITYLQHTDPKVPHFRDNEWNFQRGAACTIDRSFGTIVNHLHHHIGDSHQCHHMFSQMPFYNAVEATKYLKAKLGKYYIFDDTPIAKALYRNWRECKFVEDEGDVVFYKH

SEQ ID NO: 676 - protein, 403 aa, Artificial sequence
  Delta-15 Desaturase
MAPPHVVDEQVRRRIVVEDEIKSKKQFERNYVPMDFTIKEIRDAIPAHLFIRDTTKSILHVVKDLVTIAIVFYCATFIETLPSLALRVPAWITYWIIQGTVMVGPWILAHECGHGAFSEYKSFNTIIGWVLHSALLVPYQAWAMSHSKHHKGTGSMTKDVVFIPATRSYKGLPALEKPAVEEEVSEQEHHHHEESIFAETPIYTLGALLFVLTFGWPLYLIVNFSGHEAPHWVNHFQTVAPLYEPHQRKNIFYSNCGIVAMGSILTYLSMVFSPLTVFMYYGIPYLGVNAWIVCITYLQHTDPKVPHFRDNEWNFQRGAACTIDRSFGTIVNHLHHHIGDSHQCHHMFSQMPFYNAVEATKYLKAKLGKYYIFDDTPIAKALYRNWRECKFVEDEGDVVFYKH

SEQ ID NO: 677 - protein, 403 aa, Artificial sequence
  Delta-15 Desaturase
MAPPHVVDEQVRRRIVVEDEIKSKKQFERNYVPMDFTIKEIRDAIPAHLFIRDTTKSILHVVKDLVTIAIVFYCATFIETLPSLALRVPAWITYWIIQGTVMVGPWILAHECGHGAFSKPTRINNIMGWVLHSALLVPYQAWAMSHSKHHKGTGSMTKDVVFIPATRSYKGLPALEKPAVEEEVSEQEHHHHEESIFAETPIYTLGALLFVLTFGWPLYLIVNFSGHEAPHWVNHFQTVAPLYEPHQRKNIFYSNCGIVAMGSILTYLSMVFSPLTVFMYYGIPYLGVNAWIVCITYLQHTDPKVPHFRDNEWNFQRGAACTIDRSFGTIVNHLHHHIGDSHQCHHMFSQMPFYNAVEATKYLKAKLGKYYIFDDTPIAKALYRNWRECKFVEDEGDVVFYKH

SEQ ID NO: 678 - protein, 403 aa, Artificial sequence
  Delta-15 Desaturase
MAPPHVVDEQVRRRIVVEDEIKSKKQFERNYVPMDFTIKEIRDAIPAHLFIRDTTKSILHVVKDLVTIAIVFYCATFIETLPSLALRVPAWITYWIIQGTVMVGPWILAHECGHGAFSQHTWFNSIIGWVLHSALLVPYQAWAMSHSKHHKGTGSMTKDVVFIPATRSYKGLPALEKPAVEEEVSEQEHHHHEESIFAETPIYTLGALLFVLTFGWPLYLIVNFSGHEAPHWVNHFQTVAPLYEPHQRKNIFYSNCGIVAMGSILTYLSMVFSPLTVFMYYGIPYLGVNAWIVCITYLQHTDPKVPHFRDNEWNFQRGAACTIDRSFGTIVNHLHHHIGDSHQCHHMFSQMPFYNAVEATKYLKAKLGKYYIFDDTPIAKALYRNWRECKFVEDEGDVVFYKH

SEQ ID NO: 679 - protein, 403 aa, Artificial sequence
  Delta-15 Desaturase
MAPPHVVDEQVRRRIVVEDEIKSKKQFERNYVPMDFTIKEIRDAIPAHLFIRDTTKSILHVVKDLVTIAIVFYCATFIETLPSLALRVPAWITYWIIQGTVMVGPWILAHECGHGAFSNHTSFNSIFGWVLHSALLVPYQAWAMSHSKHHKGTGSMTKDVVFIPATRSYKGLPALEKPAVEEEVSEQEHHHHEESIFAETPIYTLGALLFVLTFGWPLYLIVNFSGHEAPHWVNHFQTVAPLYEPHQRKNIFYSNCGIVAMGSILTYLSMVFSPLTVFMYYGIPYLGVNAWIVCITYLQHTDPKVPHFRDNEWNFQRGAACTIDRSFGTIVNHLHHHIGDSHQCHHMFSQMPFYNAVEATKYLKAKLGKYYIFDDTPIAKALYRNWRECKFVEDEGDVVFYKH

SEQ ID NO: 680 - protein, 403 aa, Artificial sequence
  Delta-15 Desaturase
MAPPHVVDEQVRRRIVVEDEIKSKKQFERNYVPMDFTIKEIRDAIPAHLFIRDTTKSILHVVKDLVTIAIVFYCATFIETLPSLALRVPAWITYWIIQGTVMVGPWILAHECGHGAFSKSRTINTIMGWVLHSALLVPYQAWAMSHSKHHKGTGSMTKDVVFIPATRSYKGLPALEKPAVEEEVSEQEHHHHEESIFAETPIYTLGALLFVLTFGWPLYLIVNFSGHEAPHWVNHFQTVAPLYEPHQRKNIFYSNCGIVAMGSILTYLSMVFSPLTVFMYYGIPYLGVNAWIVCITYLQHTDPKVPHFRDNEWNFQRGAACTIDRSFGTIVNHLHHHIGDSHQCHHMFSQMPFYNAVEATKYLKAKLGKYYIFDDTPIAKALYRNWRECKFVEDEGDVVFYKH

SEQ ID NO: 681 - protein, 403 aa, Artificial sequence
  Delta-15 Desaturase
MAPPHVVDEQVRRRIVVEDEIKSKKQFERNYVPMDFTIKEIRDAIPAHLFIRDTTKSILHVVKDLVTIAIVFYCATFIETLPSLALRVPAWITYWIIQGTVMVGPWILAHECGHGAFSHHRRINYIIGWVLHSALLVPYQAWAMSHSKHHKGTGSMTKDVVFIPATRSYKGLPALEKPAVEEEVSEQEHHHHEESIFAETPIYTLGALLFVLTFGWPLYLIVNFSGHEAPHWVNHFQTVAPLYEPHQRKNIFYSNCGIVAMGSILTYLSMVFSPLTVFMYYGIPYLGVNAWIVCITYLQHTDPKVPHFRDNEWNFQRGAACTIDRSFGTIVNHLHHHIGDSHQCHHMFSQMPFYNAVEATKYLKAKLGKYYIFDDTPIAKALYRNWRECKFVEDEGDVVFYKH

SEQ ID NO: 682 - protein, 403 aa, Artificial sequence
  Delta-15 Desaturase
MAPPHVVDEQVRRRIVVEDEIKSKKQFERNYVPMDFTIKEIRDAIPAHLFIRDTTKSILHVVKDLVTIAIVFYCATFIETLPSLALRVPAWITYWIIQGTVMVGPWILAHECGHGAFSKSKSINSIFGWVLHSALLVPYQAWAMSHSKHHKGTGSMTKDVVFIPATRSYKGLPALEKPAVEEEVSEQEHHHHEESIFAETPIYTLGALLFVLTFGWPLYLIVNFSGHEAPHWVNHFQTVAPLYEPHQRKNIFYSNCGIVAMGSILTYLSMVFSPLTVFMYYGIPYLGVNAWIVCITYLQHTDPKVPHFRDNEWNFQRGAACTIDRSFGTIVNHLHHHIGDSHQCHHMFSQMPFYNAVEATKYLKAKLGKYYIFDDTPIAKALYRNWRECKFVEDEGDVVFYKH

SEQ ID NO: 683 - protein, 403 aa, Artificial sequence
  Delta-15 Desaturase
MAPPHVVDEQVRRRIVVEDEIKSKKQFERNYVPMDFTIKEIRDAIPAHLFIRDTTKSILHVVKDLVTIAIVFYCATFIETLPSLALRVPAWITYWIIQGTVMVGPWILAHECGHGAFSNSKWFNTIIGWVLHSALLVPYQAWAMSHSKHHKGTGSMTKDVVFIPATRSYKGLPALEKPAVEEEVSEQEHHHHEESIFAETPIYTLGALLFVLTFGWPLYLIVNFSGHEAPHWVNHFQTVAPLYEPHQRKNIFYSNCGIVAMGSILTYLSMVFSPLTVFMYYGIPYLGVNAWIVCITYLQHTDPKVPHFRDNEWNFQRGAACTIDRSFGTIVNHLHHHIGDSHQCHHMFSQMPFYNAVEATKYLKAKLGKYYIFDDTPIAKALYRNWRECKFVEDEGDVVFYKH

SEQ ID NO: 684 - protein, 403 aa, Artificial sequence
  Delta-15 Desaturase
MAPPHVVDEQVRRRIVVEDEIKSKKQFERNYVPMDFTIKEIRDAIPAHLFIRDTTKSILHVVKDLVTIAIVFYCATFIETLPSLALRVPAWITYWIIQGTVMVGPWILAHECGHGAFSNYTTFNNIIGWVLHSALLVPYQAWAMSHSKHHKGTGSMTKDVVFIPATRSYKGLPALEKPAVEEEVSEQEHHHHEESIFAETPIYTLGALLFVLTFGWPLYLIVNFSGHEAPHWVNHFQTVAPLYEPHQRKNIFYSNCGIVAMGSILTYLSMVFSPLTVFMYYGIPYLGVNAWIVCITYLQHTDPKVPHFRDNEWNFQRGAACTIDRSFGTIVNHLHHHIGDSHQCHHMFSQMPFYNAVEATKYLKAKLGKYYIFDDTPIAKALYRNWRECKFVEDEGDVVFYKH

SEQ ID NO: 685 - protein, 403 aa, Artificial sequence
  Delta-15 Desaturase
MAPPHVVDEQVRRRIVVEDEIKSKKQFERNYVPMDFTIKEIRDAIPAHLFIRDTTKSILHVVKDLVTIAIVFYCATFIETLPSLALRVPAWITYWIIQGTVMVGPWILAHECGHGAFSDHKWFNTIMGWVLHSALLVPYQAWAMSHSKHHKGTGSMTKDVVFIPATRSYKGLPALEKPAVEEEVSEQEHHHHEESIFAETPIYTLGALLFVLTFGWPLYLIVNFSGHEAPHWVNHFQTVAPLYEPHQRKNIFYSNCGIVAMGSILTYLSMVFSPLTVFMYYGIPYLGVNAWIVCITYLQHTDPKVPHFRDNEWNFQRGAACTIDRSFGTIVNHLHHHIGDSHQCHHMFSQMPFYNAVEATKYLKAKLGKYYIFDDTPIAKALYRNWRECKFVEDEGDVVFYKH

SEQ ID NO: 686 - protein, 403 aa, Artificial sequence
  Delta-15 Desaturase
MAPPHVVDEQVRRRIVVEDEIKSKKQFERNYVPMDFTIKEIRDAIPAHLFIRDTTKSILHVVKDLVTIAIVFYCATFIETLPSLALRVPAWITYWIIQGTVMVGPWILAHECGHGAFSESKWFNNIMGWVLHSALLVPYQAWAMSHSKHHKGTGSMTKDVVFIPATRSYKGLPALEKPAVEEEVSEQEHHHHEESIFAETPIYTLGALLFVLTFGWPLYLIVNFSGHEAPHWVNHFQTVAPLYEPHQRKNIFYSNCGIVAMGSILTYLSMVFSPLTVFMYYGIPYLGVNAWIVCITYLQHTDPKVPHFRDNEWNFQRGAACTIDRSFGTIVNHLHHHIGDSHQCHHMFSQMPFYNAVEATKYLKAKLGKYYIFDDTPIAKALYRNWRECKFVEDEGDVVFYKH

SEQ ID NO: 687 - protein, 403 aa, Artificial sequence
  Delta-15 Desaturase
MAPPHVVDEQVRRRIVVEDEIKSKKQFERNYVPMDFTIKEIRDAIPAHLFIRDTTKSILHVVKDLVTIAIVFYCATFIETLPSLALRVPAWITYWIIQGTVMVGPWILAHECGHGAFSHYTSINYIIGWVLHSALLVPYQAWAMSHSKHHKGTGSMTKDVVFIPATRSYKGLPALEKPAVEEEVSEQEHHHHEESIFAETPIYTLGALLFVLTFGWPLYLIVNFSGHEAPHWVNHFQTVAPLYEPHQRKNIFYSNCGIVAMGSILTYLSMVFSPLTVFMYYGIPYLGVNAWIVCITYLQHTDPKVPHFRDNEWNFQRGAACTIDRSFGTIVNHLHHHIGDSHQCHHMFSQMPFYNAVEATKYLKAKLGKYYIFDDTPIAKALYRNWRECKFVEDEGDVVFYKH

SEQ ID NO: 688 - protein, 403 aa, Artificial sequence
  Delta-15 Desaturase
MAPPHVVDEQVRRRIVVEDEIKSKKQFERNYVPMDFTIKEIRDAIPAHLFIRDTTKSILHVVKDLVTIAIVFYCATFIETLPSLALRVPAWITYWIIQGTVMVGPWILAHECGHGAFSKYTWINTIMGWVLHSALLVPYQAWAMSHSKHHKGTGSMTKDVVFIPATRSYKGLPALEKPAVEEEVSEQEHHHHEESIFAETPIYTLGALLFVLTFGWPLYLIVNFSGHEAPHWVNHFQTVAPLYEPHQRKNIFYSNCGIVAMGSILTYLSMVFSPLTVFMYYGIPYLGVNAWIVCITYLQHTDPKVPHFRDNEWNFQRGAACTIDRSFGTIVNHLHHHIGDSHQCHHMFSQMPFYNAVEATKYLKAKLGKYYIFDDTPIAKALYRNWRECKFVEDEGDVVFYKH

SEQ ID NO: 689 - protein, 403 aa, Artificial sequence
  Delta-15 Desaturase
MAPPHVVDEQVRRRIVVEDEIKSKKQFERNYVPMDFTIKEIRDAIPAHLFIRDTTKSILHVVKDLVTIAIVFYCATFIETLPSLALRVPAWITYWIIQGTVMVGPWILAHECGHGAFSHHKSFNYILGWVLHSALLVPYQAWAMSHSKHHKGTGSMTKDVVFIPATRSYKGLPALEKPAVEEEVSEQEHHHHEESIFAETPIYTLGALLFVLTFGWPLYLIVNFSGHEAPHWVNHFQTVAPLYEPHQRKNIFYSNCGIVAMGSILTYLSMVFSPLTVFMYYGIPYLGVNAWIVCITYLQHTDPKVPHFRDNEWNFQRGAACTIDRSFGTIVNHLHHHIGDSHQCHHMFSQMPFYNAVEATKYLKAKLGKYYIFDDTPIAKALYRNWRECKFVEDEGDVVFYKH

SEQ ID NO: 690 - protein, 403 aa, Artificial sequence
  Delta-15 Desaturase
MAPPHVVDEQVRRRIVVEDEIKSKKQFERNYVPMDFTIKEIRDAIPAHLFIRDTTKSILHVVKDLVTIAIVFYCATFIETLPSLALRVPAWITYWIIQGTVMVGPWILAHECGHGAFSQHTTFNTIIGWVLHSALLVPYQAWAMSHSKHHKGTGSMTKDVVFIPATRSYKGLPALEKPAVEEEVSEQEHHHHEESIFAETPIYTLGALLFVLTFGWPLYLIVNFSGHEAPHWVNHFQTVAPLYEPHQRKNIFYSNCGIVAMGSILTYLSMVFSPLTVFMYYGIPYLGVNAWIVCITYLQHTDPKVPHFRDNEWNFQRGAACTIDRSFGTIVNHLHHHIGDSHQCHHMFSQMPFYNAVEATKYLKAKLGKYYIFDDTPIAKALYRNWRECKFVEDEGDVVFYKH

SEQ ID NO: 691 - protein, 403 aa, Artificial sequence
  Delta-15 Desaturase
MAPPHVVDEQVRRRIVVEDEIKSKKQFERNYVPMDFTIKEIRDAIPAHLFIRDTTKSILHVVKDLVTIAIVFYCATFIETLPSLALRVPAWITYWIIQGTVMVGPWILAHECGHGAFSDPRRINYIFGWVLHSALLVPYQAWAMSHSKHHKGTGSMTKDVVFIPATRSYKGLPALEKPAVEEEVSEQEHHHHEESIFAETPIYTLGALLFVLTFGWPLYLIVNFSGHEAPHWVNHFQTVAPLYEPHQRKNIFYSNCGIVAMGSILTYLSMVFSPLTVFMYYGIPYLGVNAWIVCITYLQHTDPKVPHFRDNEWNFQRGAACTIDRSFGTIVNHLHHHIGDSHQCHHMFSQMPFYNAVEATKYLKAKLGKYYIFDDTPIAKALYRNWRECKFVEDEGDVVFYKH

SEQ ID NO: 692 - protein, 403 aa, Artificial sequence
  Delta-15 Desaturase
MAPPHVVDEQVRRRIVVEDEIKSKKQFERNYVPMDFTIKEIRDAIPAHLFIRDTTKSILHVVKDLVTIAIVFYCATFIETLPSLALRVPAWITYWIIQGTVMVGPWILAHECGHGAFSEYRSINTIIGWVLHSALLVPYQAWAMSHSKHHKGTGSMTKDVVFIPATRSYKGLPALEKPAVEEEVSEQEHHHHEESIFAETPIYTLGALLFVLTFGWPLYLIVNFSGHEAPHWVNHFQTVAPLYEPHQRKNIFYSNCGIVAMGSILTYLSMVFSPLTVFMYYGIPYLGVNAWIVCITYLQHTDPKVPHFRDNEWNFQRGAACTIDRSFGTIVNHLHHHIGDSHQCHHMFSQMPFYNAVEATKYLKAKLGKYYIFDDTPIAKALYRNWRECKFVEDEGDVVFYKH

SEQ ID NO: 693 - protein, 403 aa, Artificial sequence
  Delta-15 Desaturase
MAPPHVVDEQVRRRIVVEDEIKSKKQFERNYVPMDFTIKEIRDAIPAHLFIRDTTKSILHVVKDLVTIAIVFYCATFIETLPSLALRVPAWITYWIIQGTVMVGPWILAHECGHGAFSDSKTINTIFGWVLHSALLVPYQAWAMSHSKHHKGTGSMTKDVVFIPATKTDKDVPDLEKPAVEEEVSEQEHHHHEESIFAETPIYTLGALLFVLTFGWPLYLIVNFSGHEAPHWVNHFQTVAPLYEPHQRKNIFYSNCGIVAMGSILTYLSMVFSPLTVFMYYGIPYLGVNAWIVCITYLQHTDPKVPHFRDNEWNFQRGAACTIDRSFGTIVNHLHHHIGDSHQCHHMFSQMPFYNAVEATKYLKAKLGKYYIFDDTPIAKALYRNWRECKFVEDEGDVVFYKH

SEQ ID NO: 694 - protein, 403 aa, Artificial sequence
  Delta-15 Desaturase
MAPPHVVDEQVRRRIVVEDEIKSKKQFERNYVPMDFTIKEIRDAIPAHLFIRDTTKSILHVVKDLVTIAIVFYCATFIETLPSLALRVPAWITYWIIQGTVMVGPWILAHECGHGAFSQPRRINTIFGWVLHSALLVPYQAWAMSHSKHHKGTGSMTKDVVFIPATRSYKGLPALEKPAVEEEVSEQEHHHHEESIFAETPIYTLGALLFVLTFGWPLYLIVNFSGHEAPHWVNHFQTVAPLYEPHQRKNIFYSNCGIVAMGSILTYLSMVFSPLTVFMYYGIPYLGVNAWIVCITYLQHTDPKVPHFRDNEWNFQRGAACTIDRSFGTIVNHLHHHIGDSHQCHHMFSQMPFYNAVEATKYLKAKLGKYYIFDDTPIAKALYRNWRECKFVEDEGDVVFYKH

SEQ ID NO: 695 - protein, 403 aa, Artificial sequence
  Delta-15 Desaturase
MAPPHVVDEQVRRRIVVEDEIKSKKQFERNYVPMDFTIKEIRDAIPAHLFIRDTTKSILHVVKDLVTIAIVFYCATFIETLPSLALRVPAWITYWIIQGTVMVGPWILAHECGHGAFSNSRTINTILGWVLHSALLVPYQAWAMSHSKHHKGTGSMTKDVVFIPATRSYKGLPALEKPAVEEEVSEQEHHHHEESIFAETPIYTLGALLFVLTFGWPLYLIVNFSGHEAPHWVNHFQTVAPLYEPHQRKNIFYSNCGIVAMGSILTYLSMVFSPLTVFMYYGIPYLGVNAWIVCITYLQHTDPKVPHFRDNEWNFQRGAACTIDRSFGTIVNHLHHHIGDSHQCHHMFSQMPFYNAVEATKYLKAKLGKYYIFDDTPIAKALYRNWRECKFVEDEGDVVFYKH

SEQ ID NO: 696 - protein, 403 aa, Artificial sequence
  Delta-15 Desaturase
MAPPHVVDEQVRRRIVVEDEIKSKKQFERNYVPMDFTIKEIRDAIPAHLFIRDTTKSILHVVKDLVTIAIVFYCATFIETLPSLALRVPAWITYWIIQGTVMVGPWILAHECGHGAFSKYKSFNSIFGWVLHSALLVPYQAWAMSHSKHHKGTGSMTKDVVFIPATRSYKGLPALEKPAVEEEVSEQEHHHHEESIFAETPIYTLGALLFVLTFGWPLYLIVNFSGHEAPHWVNHFQTVAPLYEPHQRKNIFYSNCGIVAMGSILTYLSMVFSPLTVFMYYGIPYLGVNAWIVCITYLQHTDPKVPHFRDNEWNFQRGAACTIDRSFGTIVNHLHHHIGDSHQCHHMFSQMPFYNAVEATKYLKAKLGKYYIFDDTPIAKALYRNWRECKFVEDEGDVVFYKH

SEQ ID NO: 697 - protein, 403 aa, Artificial sequence
  Delta-15 Desaturase
MAPPHVVDEQVRRRIVVEDEIKSKKQFERNYVPMDFTIKEIRDAIPAHLFIRDTTKSILHVVKDLVTIAIVFYCATFIETLPSLALRVPAWITYWIIQGTVMVGPWILAHECGHGAFSKSRRFNYIMGWVLHSALLVPYQAWAMSHSKHHKGTGSMTKDVVFIPATRSYKGLPALEKPAVEEEVSEQEHHHHEESIFAETPIYTLGALLFVLTFGWPLYLIVNFSGHEAPHWVNHFQTVAPLYEPHQRKNIFYSNCGIVAMGSILTYLSMVFSPLTVFMYYGIPYLGVNAWIVCITYLQHTDPKVPHFRDNEWNFQRGAACTIDRSFGTIVNHLHHHIGDSHQCHHMFSQMPFYNAVEATKYLKAKLGKYYIFDDTPIAKALYRNWRECKFVEDEGDVVFYKH

SEQ ID NO: 698 - protein, 403 aa, Artificial sequence
  Delta-15 Desaturase
MAPPHVVDEQVRRRIVVEDEIKSKKQFERNYVPMDFTIKEIRDAIPAHLFIRDTTKSILHVVKDLVTIAIVFYCATFIETLPSLALRVPAWITYWIIQGTVMVGPWILAHECGHGAFSKHTWFNYIFGWVLHSALLVPYQAWAMSHSKHHKGTGSMTKDVVFIPATRSYKGLPALEKPAVEEEVSEQEHHHHEESIFAETPIYTLGALLFVLTFGWPLYLIVNFSGHEAPHWVNHFQTVAPLYEPHQRKNIFYSNCGIVAMGSILTYLSMVFSPLTVFMYYGIPYLGVNAWIVCITYLQHTDPKVPHFRDNEWNFQRGAACTIDRSFGTIVNHLHHHIGDSHQCHHMFSQMPFYNAVEATKYLKAKLGKYYIFDDTPIAKALYRNWRECKFVEDEGDVVFYKH

SEQ ID NO: 699 - protein, 403 aa, Artificial sequence
  Delta-15 Desaturase
MAPPHVVDEQVRRRIVVEDEIKSKKQFERNYVPMDFTIKEIRDAIPAHLFIRDTTKSILHVVKDLVTIAIVFYCATFIETLPSLALRVPAWITYWIIQGTVMVGPWILAHECGHGAFSNHKSFNTIFGWVLHSALLVPYQAWAMSHSKHHKGTGSMTKDVVFIPATRSYKGLPALEKPAVEEEVSEQEHHHHEESIFAETPIYTLGALLFVLTFGWPLYLIVNFSGHEAPHWVNHFQTVAPLYEPHQRKNIFYSNCGIVAMGSILTYLSMVFSPLTVFMYYGIPYLGVNAWIVCITYLQHTDPKVPHFRDNEWNFQRGAACTIDRSFGTIVNHLHHHIGDSHQCHHMFSQMPFYNAVEATKYLKAKLGKYYIFDDTPIAKALYRNWRECKFVEDEGDVVFYKH

SEQ ID NO: 700 - protein, 403 aa, Artificial sequence
  Delta-15 Desaturase
MAPPHVVDEQVRRRIVVEDEIKSKKQFERNYVPMDFTIKEIRDAIPAHLFIRDTTKSILHVVKDLVTIAIVFYCATFIETLPSLALRVPAWITYWIIQGTVMVGPWILAHECGHGAFSESRWFNTIIGWVLHSALLVPYQAWAMSHSKHHKGTGSMTKDVVFIPATRSYKGLPALEKPAVEEEVSEQEHHHHEESIFAETPIYTLGALLFVLTFGWPLYLIVNFSGHEAPHWVNHFQTVAPLYEPHQRKNIFYSNCGIVAMGSILTYLSMVFSPLTVFMYYGIPYLGVNAWIVCITYLQHTDPKVPHFRDNEWNFQRGAACTIDRSFGTIVNHLHHHIGDSHQCHHMFSQMPFYNAVEATKYLKAKLGKYYIFDDTPIAKALYRNWRECKFVEDEGDVVFYKH

SEQ ID NO: 701 - protein, 403 aa, Artificial sequence
  Delta-15 Desaturase
MAPPHVVDEQVRRRIVVEDEIKSKKQFERNYVPMDFTIKEIRDAIPAHLFIRDTTKSILHVVKDLVTIAIVFYCATFIETLPSLALRVPAWITYWIIQGTVMVGPWILAHECGHGAFSNYKSINSILGWVLHSALLVPYQAWAMSHSKHHKGTGSMTKDVVFIPATRSYKGLPALEKPAVEEEVSEQEHHHHEESIFAETPIYTLGALLFVLTFGWPLYLIVNFSGHEAPHWVNHFQTVAPLYEPHQRKNIFYSNCGIVAMGSILTYLSMVFSPLTVFMYYGIPYLGVNAWIVCITYLQHTDPKVPHFRDNEWNFQRGAACTIDRSFGTIVNHLHHHIGDSHQCHHMFSQMPFYNAVEATKYLKAKLGKYYIFDDTPIAKALYRNWRECKFVEDEGDVVFYKH

SEQ ID NO: 702 - protein, 403 aa, Artificial sequence
  Delta-15 Desaturase
MAPPHVVDEQVRRRIVVEDEIKSKKQFERNYVPMDFTIKEIRDAIPAHLFIRDTTKSILHVVKDLVTIAIVFYCATFIETLPSLALRVPAWITYWIIQGTVMVGPWILAHECGHGAFSDSKTINTIFGWVLHSALLVPYQAWAMSHSKHHKGTGSMTKDVVFIPATSAFKSVRTLEKPAVEEEVSEQEHHHHEESIFAETPIYTLGALLFVLTFGWPLYLIVNFSGHEAPHWVNHFQTVAPLYEPHQRKNIFYSNCGIVAMGSILTYLSMVFSPLTVFMYYGIPYLGVNAWIVCITYLQHTDPKVPHFRDNEWNFQRGAACTIDRSFGTIVNHLHHHIGDSHQCHHMFSQMPFYNAVEATKYLKAKLGKYYIFDDTPIAKALYRNWRECKFVEDEGDVVFYKH

SEQ ID NO: 703 - protein, 403 aa, Artificial sequence
  Delta-15 Desaturase
MAPPHVVDEQVRRRIVVEDEIKSKKQFERNYVPMDFTIKEIRDAIPAHLFIRDTTKSILHVVKDLVTIAIVFYCATFIETLPSLALRVPAWITYWIIQGTVMVGPWILAHECGHGAFSEHKTINSIFGWVLHSALLVPYQAWAMSHSKHHKGTGSMTKDVVFIPATRSYKGLPALEKPAVEEEVSEQEHHHHEESIFAETPIYTLGALLFVLTFGWPLYLIVNFSGHEAPHWVNHFQTVAPLYEPHQRKNIFYSNCGIVAMGSILTYLSMVFSPLTVFMYYGIPYLGVNAWIVCITYLQHTDPKVPHFRDNEWNFQRGAACTIDRSFGTIVNHLHHHIGDSHQCHHMFSQMPFYNAVEATKYLKAKLGKYYIFDDTPIAKALYRNWRECKFVEDEGDVVFYKH

SEQ ID NO: 704 - protein, 403 aa, Artificial sequence
  Delta-15 Desaturase
MAPPHVVDEQVRRRIVVEDEIKSKKQFERNYVPMDFTIKEIRDAIPAHLFIRDTTKSILHVVKDLVTIAIVFYCATFIETLPSLALRVPAWITYWIIQGTVMVGPWILAHECGHGAFSNSTRFNTIFGWVLHSALLVPYQAWAMSHSKHHKGTGSMTKDVVFIPATRSYKGLPALEKPAVEEEVSEQEHHHHEESIFAETPIYTLGALLFVLTFGWPLYLIVNFSGHEAPHWVNHFQTVAPLYEPHQRKNIFYSNCGIVAMGSILTYLSMVFSPLTVFMYYGIPYLGVNAWIVCITYLQHTDPKVPHFRDNEWNFQRGAACTIDRSFGTIVNHLHHHIGDSHQCHHMFSQMPFYNAVEATKYLKAKLGKYYIFDDTPIAKALYRNWRECKFVEDEGDVVFYKH

SEQ ID NO: 705 - protein, 403 aa, Artificial sequence
  Delta-15 Desaturase
MAPPHVVDEQVRRRIVVEDEIKSKKQFERNYVPMDFTIKEIRDAIPAHLFIRDTTKSILHVVKDLVTIAIVFYCATFIETLPSLALRVPAWITYWIIQGTVMVGPWILAHECGHGAFSEHKRINYIIGWVLHSALLVPYQAWAMSHSKHHKGTGSMTKDVVFIPATRSYKGLPALEKPAVEEEVSEQEHHHHEESIFAETPIYTLGALLFVLTFGWPLYLIVNFSGHEAPHWVNHFQTVAPLYEPHQRKNIFYSNCGIVAMGSILTYLSMVFSPLTVFMYYGIPYLGVNAWIVCITYLQHTDPKVPHFRDNEWNFQRGAACTIDRSFGTIVNHLHHHIGDSHQCHHMFSQMPFYNAVEATKYLKAKLGKYYIFDDTPIAKALYRNWRECKFVEDEGDVVFYKH

SEQ ID NO: 706 - protein, 403 aa, Artificial sequence
  Delta-15 Desaturase
MAPPHVVDEQVRRRIVVEDEIKSKKQFERNYVPMDFTIKEIRDAIPAHLFIRDTTKSILHVVKDLVTIAIVFYCATFIETLPSLALRVPAWITYWIIQGTVMVGPWILAHECGHGAFSKPTWINTIFGWVLHSALLVPYQAWAMSHSKHHKGTGSMTKDVVFIPATRSYKGLPALEKPAVEEEVSEQEHHHHEESIFAETPIYTLGALLFVLTFGWPLYLIVNFSGHEAPHWVNHFQTVAPLYEPHQRKNIFYSNCGIVAMGSILTYLSMVFSPLTVFMYYGIPYLGVNAWIVCITYLQHTDPKVPHFRDNEWNFQRGAACTIDRSFGTIVNHLHHHIGDSHQCHHMFSQMPFYNAVEATKYLKAKLGKYYIFDDTPIAKALYRNWRECKFVEDEGDVVFYKH

SEQ ID NO: 707 - protein, 403 aa, Artificial sequence
  Delta-15 Desaturase
MAPPHVVDEQVRRRIVVEDEIKSKKQFERNYVPMDFTIKEIRDAIPAHLFIRDTTKSILHVVKDLVTIAIVFYCATFIETLPSLALRVPAWITYWIIQGTVMVGPWILAHECGHGAFSDSKTINTIFGWVLHSALLVPYQAWAMSHSKHHKSTGNMTKDVVFIPATRSYKGLPALEKPAVEEEVSEQEHHHHEESIFAETPIYTLGALLFVLTFGWPLYLIVNFSGHEAPHWVNHFQTVAPLYEPHQRKNIFYSNCGIVAMGSILTYLSMVFSPLTVFMYYGIPYLGVNAWIVCITYLQHTDPKVPHFRDNEWNFQRGAACTIDRSFGTIVNHLHHHIGDSHQCHHMFSQMPFYNAVEATKYLKAKLGKYYIFDDTPIAKALYRNWRECKFVEDEGDVVFYKH

SEQ ID NO: 708 - protein, 403 aa, Artificial sequence
  Delta-15 Desaturase
MAPPHVVDEQVRRRIVVEDEIKSKKQFERNYVPMDFTIKEIRDAIPAHLFIRDTTKSILHVVKDLVTIAIVFYCATFIETLPSLALRVPAWITYWIIQGTVMVGPWILAHECGHGAFSNHRSFNSIIGWVLHSALLVPYQAWAMSHSKHHKGTGSMTKDVVFIPATRSYKGLPALEKPAVEEEVSEQEHHHHEESIFAETPIYTLGALLFVLTFGWPLYLIVNFSGHEAPHWVNHFQTVAPLYEPHQRKNIFYSNCGIVAMGSILTYLSMVFSPLTVFMYYGIPYLGVNAWIVCITYLQHTDPKVPHFRDNEWNFQRGAACTIDRSFGTIVNHLHHHIGDSHQCHHMFSQMPFYNAVEATKYLKAKLGKYYIFDDTPIAKALYRNWRECKFVEDEGDVVFYKH

SEQ ID NO: 709 - protein, 403 aa, Artificial sequence
  Delta-15 Desaturase
MAPPHVVDEQVRRRIVVEDEIKSKKQFERNYVPMDFTIKEIRDAIPAHLFIRDTTKSILHVVKDLVTIAIVFYCATFIETLPSLALRVPAWITYWIIQGTVMVGPWILAHECGHGAFSNYKSFNSIIGWVLHSALLVPYQAWAMSHSKHHKGTGSMTKDVVFIPATRSYKGLPALEKPAVEEEVSEQEHHHHEESIFAETPIYTLGALLFVLTFGWPLYLIVNFSGHEAPHWVNHFQTVAPLYEPHQRKNIFYSNCGIVAMGSILTYLSMVFSPLTVFMYYGIPYLGVNAWIVCITYLQHTDPKVPHFRDNEWNFQRGAACTIDRSFGTIVNHLHHHIGDSHQCHHMFSQMPFYNAVEATKYLKAKLGKYYIFDDTPIAKALYRNWRECKFVEDEGDVVFYKH

SEQ ID NO: 710 - protein, 403 aa, Artificial sequence
  Delta-15 Desaturase
MAPPHVVDEQVRRRIVVEDEIKSKKQFERNYVPMDFTIKEIRDAIPAHLFIRDTTKSILHVVKDLVTIAIVFYCATFIETLPSLALRVPAWITYWIIQGTVMVGPWILAHECGHGAFSKHTSFNSIIGWVLHSALLVPYQAWAMSHSKHHKGTGSMTKDVVFIPATRSYKGLPALEKPAVEEEVSEQEHHHHEESIFAETPIYTLGALLFVLTFGWPLYLIVNFSGHEAPHWVNHFQTVAPLYEPHQRKNIFYSNCGIVAMGSILTYLSMVFSPLTVFMYYGIPYLGVNAWIVCITYLQHTDPKVPHFRDNEWNFQRGAACTIDRSFGTIVNHLHHHIGDSHQCHHMFSQMPFYNAVEATKYLKAKLGKYYIFDDTPIAKALYRNWRECKFVEDEGDVVFYKH

SEQ ID NO: 711 - protein, 403 aa, Artificial sequence
  Delta-15 Desaturase
MAPPHVVDEQVRRRIVVEDEIKSKKQFERNYVPMDFTIKEIRDAIPAHLFIRDTTKSILHVVKDLVTIAIVFYCATFIETLPSLALRVPAWITYWIIQGTVMVGPWILAHECGHGAFSNYTRINTIIGWVLHSALLVPYQAWAMSHSKHHKGTGSMTKDVVFIPATRSYKGLPALEKPAVEEEVSEQEHHHHEESIFAETPIYTLGALLFVLTFGWPLYLIVNFSGHEAPHWVNHFQTVAPLYEPHQRKNIFYSNCGIVAMGSILTYLSMVFSPLTVFMYYGIPYLGVNAWIVCITYLQHTDPKVPHFRDNEWNFQRGAACTIDRSFGTIVNHLHHHIGDSHQCHHMFSQMPFYNAVEATKYLKAKLGKYYIFDDTPIAKALYRNWRECKFVEDEGDVVFYKH

SEQ ID NO: 712 - protein, 403 aa, Artificial sequence
  Delta-15 Desaturase
MAPPHVVDEQVRRRIVVEDEIKSKKQFERNYVPMDFTIKEIRDAIPAHLFIRDTTKSILHVVKDLVTIAIVFYCATFIETLPSLALRVPAWITYWIIQGTVMVGPWILAHECGHGAFSNYRWFNNILGWVLHSALLVPYQAWAMSHSKHHKGTGSMTKDVVFIPATRSYKGLPALEKPAVEEEVSEQEHHHHEESIFAETPIYTLGALLFVLTFGWPLYLIVNFSGHEAPHWVNHFQTVAPLYEPHQRKNIFYSNCGIVAMGSILTYLSMVFSPLTVFMYYGIPYLGVNAWIVCITYLQHTDPKVPHFRDNEWNFQRGAACTIDRSFGTIVNHLHHHIGDSHQCHHMFSQMPFYNAVEATKYLKAKLGKYYIFDDTPIAKALYRNWRECKFVEDEGDVVFYKH

SEQ ID NO: 713 - protein, 403 aa, Artificial sequence
  Delta-15 Desaturase
MAPPHVVDEQVRRRIVVEDEIKSKKQFERNYVPMDFTIKEIRDAIPAHLFIRDTTKSILHVVKDLVTIAIVFYCATFIETLPSLALRVPAWITYWIIQGTVMVGPWILAHECGHGAFSNHRWINTIIGWVLHSALLVPYQAWAMSHSKHHKGTGSMTKDVVFIPATRSYKGLPALEKPAVEEEVSEQEHHHHEESIFAETPIYTLGALLFVLTFGWPLYLIVNFSGHEAPHWVNHFQTVAPLYEPHQRKNIFYSNCGIVAMGSILTYLSMVFSPLTVFMYYGIPYLGVNAWIVCITYLQHTDPKVPHFRDNEWNFQRGAACTIDRSFGTIVNHLHHHIGDSHQCHHMFSQMPFYNAVEATKYLKAKLGKYYIFDDTPIAKALYRNWRECKFVEDEGDVVFYKH

SEQ ID NO: 714 - protein, 403 aa, Artificial sequence
  Delta-15 Desaturase
MAPPHVVDEQVRRRIVVEDEIKSKKQFERNYVPMDFTIKEIRDAIPAHLFIRDTTKSILHVVKDLVTIAIVFYCATFIETLPSLALRVPAWITYWIIQGTVMVGPWILAHECGHGAFSEPKWINNIIGWVLHSALLVPYQAWAMSHSKHHKGTGSMTKDVVFIPATRSYKGLPALEKPAVEEEVSEQEHHHHEESIFAETPIYTLGALLFVLTFGWPLYLIVNFSGHEAPHWVNHFQTVAPLYEPHQRKNIFYSNCGIVAMGSILTYLSMVFSPLTVFMYYGIPYLGVNAWIVCITYLQHTDPKVPHFRDNEWNFQRGAACTIDRSFGTIVNHLHHHIGDSHQCHHMFSQMPFYNAVEATKYLKAKLGKYYIFDDTPIAKALYRNWRECKFVEDEGDVVFYKH

SEQ ID NO: 715 - protein, 403 aa, Artificial sequence
  Delta-15 Desaturase
MAPPHVVDEQVRRRIVVEDEIKSKKQFERNYVPMDFTIKEIRDAIPAHLFIRDTTKSILHVVKDLVTIAIVFYCATFIETLPSLALRVPAWITYWIIQGTVMVGPWILAHECGHGAFSNHKRFNSILGWVLHSALLVPYQAWAMSHSKHHKGTGSMTKDVVFIPATRSYKGLPALEKPAVEEEVSEQEHHHHEESIFAETPIYTLGALLFVLTFGWPLYLIVNFSGHEAPHWVNHFQTVAPLYEPHQRKNIFYSNCGIVAMGSILTYLSMVFSPLTVFMYYGIPYLGVNAWIVCITYLQHTDPKVPHFRDNEWNFQRGAACTIDRSFGTIVNHLHHHIGDSHQCHHMFSQMPFYNAVEATKYLKAKLGKYYIFDDTPIAKALYRNWRECKFVEDEGDVVFYKH

SEQ ID NO: 716 - protein, 403 aa, Artificial sequence
  Delta-15 Desaturase
MAPPHVVDEQVRRRIVVEDEIKSKKQFERNYVPMDFTIKEIRDAIPAHLFIRDTTKSILHVVKDLVTIAIVFYCATFIETLPSLALRVPAWITYWIIQGTVMVGPWILAHECGHGAFSDSKTINTIFGWVLHSALLVPYQAWAMSHSKHHKGTGSMTKDVVFIPATRSYKGLPARHNLYMYEEVSEQEHHHHEESIFAETPIYTLGALLFVLTFGWPLYLIVNFSGHEAPHWVNHFQTVAPLYEPHQRKNIFYSNCGIVAMGSILTYLSMVFSPLTVFMYYGIPYLGVNAWIVCITYLQHTDPKVPHFRDNEWNFQRGAACTIDRSFGTIVNHLHHHIGDSHQCHHMFSQMPFYNAVEATKYLKAKLGKYYIFDDTPIAKALYRNWRECKFVEDEGDVVFYKH

SEQ ID NO: 717 - protein, 403 aa, Artificial sequence
  Delta-15 Desaturase
MAPPHVVDEQVRRRIVVEDEIKSKKQFERNYVPMDFTIKEIRDAIPAHLFIRDTTKSILHVVKDLVTIAIVFYCATFIETLPSLALRVPAWITYWIIQGTVMVGPWILAHECGHGAFSDSKTINTIFGWVLHSALLVPYQAWAMSHSKHHKGTGSMTKDVVFIPATRAHRDTPDLEKPAVEEEVSEQEHHHHEESIFAETPIYTLGALLFVLTFGWPLYLIVNFSGHEAPHWVNHFQTVAPLYEPHQRKNIFYSNCGIVAMGSILTYLSMVFSPLTVFMYYGIPYLGVNAWIVCITYLQHTDPKVPHFRDNEWNFQRGAACTIDRSFGTIVNHLHHHIGDSHQCHHMFSQMPFYNAVEATKYLKAKLGKYYIFDDTPIAKALYRNWRECKFVEDEGDVVFYKH

SEQ ID NO: 718 - protein, 403 aa, Artificial sequence
  Delta-15 Desaturase
MAPPHVVDEQVRRRIVVEDEIKSKKQFERNYVPMDFTIKEIRDAIPAHLFIRDTTKSILHVVKDLVTIAIVFYCATFIETLPSLALRVPAWITYWIIQGTVMVGPWILAHECGHGAFSNSRRFNNILGWVLHSALLVPYQAWAMSHSKHHKGTGSMTKDVVFIPATRSYKGLPALEKPAVEEEVSEQEHHHHEESIFAETPIYTLGALLFVLTFGWPLYLIVNFSGHEAPHWVNHFQTVAPLYEPHQRKNIFYSNCGIVAMGSILTYLSMVFSPLTVFMYYGIPYLGVNAWIVCITYLQHTDPKVPHFRDNEWNFQRGAACTIDRSFGTIVNHLHHHIGDSHQCHHMFSQMPFYNAVEATKYLKAKLGKYYIFDDTPIAKALYRNWRECKFVEDEGDVVFYKH

SEQ ID NO: 719 - protein, 403 aa, Artificial sequence
  Delta-15 Desaturase
MAPPHVVDEQVRRRIVVEDEIKSKKQFERNYVPMDFTIKEIRDAIPAHLFIRDTTKSILHVVKDLVTIAIVFYCATFIETLPSLALRVPAWITYWIIQGTVMVGPWILAHECGHGAFSNYTTFNTIIGWVLHSALLVPYQAWAMSHSKHHKGTGSMTKDVVFIPATRSYKGLPALEKPAVEEEVSEQEHHHHEESIFAETPIYTLGALLFVLTFGWPLYLIVNFSGHEAPHWVNHFQTVAPLYEPHQRKNIFYSNCGIVAMGSILTYLSMVFSPLTVFMYYGIPYLGVNAWIVCITYLQHTDPKVPHFRDNEWNFQRGAACTIDRSFGTIVNHLHHHIGDSHQCHHMFSQMPFYNAVEATKYLKAKLGKYYIFDDTPIAKALYRNWRECKFVEDEGDVVFYKH

SEQ ID NO: 720 - protein, 403 aa, Artificial sequence
  Delta-15 Desaturase
MAPPHVVDEQVRRRIVVEDEIKSKKQFERNYVPMDFTIKEIRDAIPAHLFIRDTTKSILHVVKDLVTIAIVFYCATFIETLPSLALRVPAWITYWIIQGTVMVGPWILAHECGHGAFSHHKRINSIMGWVLHSALLVPYQAWAMSHSKHHKGTGSMTKDVVFIPATRSYKGLPALEKPAVEEEVSEQEHHHHEESIFAETPIYTLGALLFVLTFGWPLYLIVNFSGHEAPHWVNHFQTVAPLYEPHQRKNIFYSNCGIVAMGSILTYLSMVFSPLTVFMYYGIPYLGVNAWIVCITYLQHTDPKVPHFRDNEWNFQRGAACTIDRSFGTIVNHLHHHIGDSHQCHHMFSQMPFYNAVEATKYLKAKLGKYYIFDDTPIAKALYRNWRECKFVEDEGDVVFYKH

SEQ ID NO: 721 - protein, 403 aa, Artificial sequence
  Delta-15 Desaturase
MAPPHVVDEQVRRRIVVEDEIKSKKQFERNYVPMDFTIKEIRDAIPAHLFIRDTTKSILHVVKDLVTIAIVFYCATFIETLPSLALRVPAWITYWIIQGTVMVGPWILAHECGHGAFSNYTWFNYIFGWVLHSALLVPYQAWAMSHSKHHKGTGSMTKDVVFIPATRSYKGLPALEKPAVEEEVSEQEHHHHEESIFAETPIYTLGALLFVLTFGWPLYLIVNFSGHEAPHWVNHFQTVAPLYEPHQRKNIFYSNCGIVAMGSILTYLSMVFSPLTVFMYYGIPYLGVNAWIVCITYLQHTDPKVPHFRDNEWNFQRGAACTIDRSFGTIVNHLHHHIGDSHQCHHMFSQMPFYNAVEATKYLKAKLGKYYIFDDTPIAKALYRNWRECKFVEDEGDVVFYKH

SEQ ID NO: 722 - protein, 403 aa, Artificial sequence
  Delta-15 Desaturase
MAPPHVVDEQVRRRIVVEDEIKSKKQFERNYVPMDFTIKEIRDAIPAHLFIRDTTKSILHVVKDLVTIAIVFYCATFIETLPSLALRVPAWITYWIIQGTVMVGPWILAHECGHGAFSHPKWINSILGWVLHSALLVPYQAWAMSHSKHHKGTGSMTKDVVFIPATRSYKGLPALEKPAVEEEVSEQEHHHHEESIFAETPIYTLGALLFVLTFGWPLYLIVNFSGHEAPHWVNHFQTVAPLYEPHQRKNIFYSNCGIVAMGSILTYLSMVFSPLTVFMYYGIPYLGVNAWIVCITYLQHTDPKVPHFRDNEWNFQRGAACTIDRSFGTIVNHLHHHIGDSHQCHHMFSQMPFYNAVEATKYLKAKLGKYYIFDDTPIAKALYRNWRECKFVEDEGDVVFYKH

SEQ ID NO: 723 - protein, 403 aa, Artificial sequence
  Delta-15 Desaturase
MAPPHVVDEQVRRRIVVEDEIKSKKQFERNYVPMDFTIKEIRDAIPAHLFIRDTTKSILHVVKDLVTIAIVFYCATFIETLPSLALRVPAWITYWIIQGTVMVGPWILAHECGHGAFSQHTRINYILGWVLHSALLVPYQAWAMSHSKHHKATGTMSKDFVFIPATRSYKGLPALEKPAVEEEVSEQEHHHHEESIFAETPIYTLGALLFVLTFGWPLYLIVNFSGHEAPHWVNHFQTVAPLYEPHQRKNIFYSNCGIVAMGSILTYLSMVFSPLTVFMYYGIPYLGVNAWIVCITYLQHTDPKVPHFRDNEWNFQRGAACTIDRSFGTIVNHLHHHIGDSHQCHHMFSQMPFYNAVEATKYLKAKLGKYYIFDDTPIAKALYRNWRECKFVEDEGDVVFYKH

SEQ ID NO: 724 - protein, 403 aa, Artificial sequence
  Delta-15 Desaturase
MAPPHVVDEQVRRRIVVEDEIKSKKQFERNYVPMDFTIKEIRDAIPAHLFIRDTTKSILHVVKDLVTIAIVFYCATFIETLPSLALRVPAWITYWIIQGTVMVGPWILAHECGHGAFSDSKTINTIFGWVLHSALLVPYQAWAMSHSKHHKGTGSMTKDVVFIPATRSYKGLPALEKPAVEEEVSEQEHHHHEESIFAETPIYSLVAFVTDQTFGWPLYLIVNFSGHEAPHWVNHFQTVAPLYEPHQRKNIFYSNCGIVAMGSILTYLSMVFSPLTVFMYYGIPYLGVNAWIVCITYLQHTDPKVPHFRDNEWNFQRGAACTIDRSFGTIVNHLHHHIGDSHQCHHMFSQMPFYNAVEATKYLKAKLGKYYIFDDTPIAKALYRNWRECKFVEDEGDVVFYKH

SEQ ID NO: 725 - protein, 403 aa, Artificial sequence
  Delta-15 Desaturase
MAPPHVVDEQVRRRIVVEDEIKSKKQFERNYVPMDFTIKEIRDAIPAHLFIRDTTKSILHVVKDLVTIAIVFYCATFIETLPSLALRVPAWITYWIIQGTVMVGPWILAHECGHGAFSDSKTINTIFGWVLHSALLVPYQAWAMSHSKHHKYTGAMTKDLVFIPATRSYKGLPALEKPAVEEEVSEQEHHHHEESIFAETPIYTLGALLFVLTFGWPLYLIVNFSGHEAPHWVNHFQTVAPLYEPHQRKNIFYSNCGIVAMGSILTYLSMVFSPLTVFMYYGIPYLGVNAWIVCITYLQHTDPKVPHFRDNEWNFQRGAACTIDRSFGTIVNHLHHHIGDSHQCHHMFSQMPFYNAVEATKYLKAKLGKYYIFDDTPIAKALYRNWRECKFVEDEGDVVFYKH

SEQ ID NO: 726 - protein, 403 aa, Artificial sequence
  Delta-15 Desaturase
MAPPHVVDEQVRRRIVVEDEIKSKKQFERNYVPMDFTIKEIRDAIPAHLFIRDTTKSILHVVKDLVTIAIVFYCATFIETLPSLALRVPAWITYWIIQGTVMVGPWILAHECGHGAFSHHKWFNTILGWVLHSALLVPYQAWAMSHSKHHKFTGTMAKDVVFIPATRSYKGLPALEKPAVEEEVSEQEHHHHEESIFAETPIYTLGALLFVLTFGWPLYLIVNFSGHEAPHWVNHFQTASPFYKHRQRKNIFYSNCGIVAMGSILTYLSMVFSPLTVFMYYGIPYLGVNAWIVCITYLQHTDPKVPHFRDNEWNFQRGAACTIDRSFGTIVNHLHHHIGDSHQCHHMFSQMPFYNAVEATKYLKAKLGKYYIFDDTPIAKALYRNWRECKFVEDEGDVVFYKH

SEQ ID NO: 727 - protein, 403 aa, Artificial sequence
  Delta-15 Desaturase
MAPPHVVDEQVRRRIVVEDEIKSKKQFERNYVPMDFTIKEIRDAIPAHLFIRDTTKSILHVVKDLVTIAIVFYCATFIETLPSLALRVPAWITYWIIQGTVMVGPWILAHECGHGAFSDSKTINTIFGWVLHSALLVPYQAWAMSHSKHHKVTGPMSKDMVFIPATRSYKGLPALEKPAVEEEVSEQEHHHHEESIFAETPIYTLGALLFVLTFGWPLYLIVNFSGHEAPHWVNHFQTVAPLYEPHQRKNIFYSNCGIVAMGSILTYLSMVFSPLTVFMYYGIPYLGVNAWIVCITYLQHTDPKVPHFRDNEWNFQRGAACTIDRSFGTIVNHLHHHIGDSHQCHHMFSQMPFYNAVEATKYLKAKLGKYYIFDDTPIAKALYRNWRECKFVEDEGDVVFYKH

SEQ ID NO: 728 - protein, 403 aa, Artificial sequence
  Delta-15 Desaturase
MAPPHVVDEQVRRRIVVEDEIKSKKQFERNYVPMDFTIKEIRDAIPAHLFIRDTTKSILHVVKDLVTIAIVFYCATFIETLPSLALRVPAWITYWIIQGTVMVGPWILAHECGHGAFSDPKRINSIISWVLHSALLVPYQAWAMSHSKHHKFTGRMKKDVVFIPATRSYKGLPALEKPAVEEEVSEQEHHHHEESIFAETPIYTLGALLFVLTFGWPLYLIVNFSGHEAPHWVNHFQTVAPLYEPHQRKNIFYSNCGIVAMGSILTYLSMVFSPLTVFMYYGIPYLGVNAWIVCITYLQHTDPKVPHFRDNEWNFQRGAACTIDRSFGTIVNHLHHHIGDSHQCHHMFSQMPFYNAVEATKYLKAKLGKYYIFDDTPIAKALYRNWRECKFVEDEGDVVFYKH

SEQ ID NO: 729 - protein, 403 aa, Artificial sequence
  Delta-15 Desaturase
MAPPHVVDEQVRRRIVVEDEIKSKKQFERNYVPMDFTIKEIRDAIPAHLFIRDTTKSILHVVKDLVTIAIVFYCATFIETLPSLALRVPAWITYWIIQGTVMVGPWILAHECGHGAFSHHKWFNTILGWVLHSALLVPYQAWAMSHSKHHKFTGTMAKDVVFIPATRSYKGLPALEKPAVEEEVSEQEHHHHEESIFAETPIYTLGALLFVLTFGWPLYLIVNFSGHEAPHWVNHFQSIASIFETRQRKNIFYSNCGIVAMGSILTYLSMVFSPLTVFMYYGIPYLGVNAWIVCITYLQHTDPKVPHFRDNEWNFQRGAACTIDRSFGTIVNHLHHHIGDSHQCHHMFSQMPFYNAVEATKYLKAKLGKYYIFDDTPIAKALYRNWRECKFVEDEGDVVFYKH

SEQ ID NO: 730 - protein, 403 aa, Artificial sequence
  Delta-15 Desaturase
MAPPHVVDEQVRRRIVVEDEIKSKKQFERNYVPMDFTIKEIRDAIPAHLFIRDTTKSILHVVKDLVTIAIVFYCATFIETLPSLALRVPAWITYWIIQGTVMVGPWILAHECGHGAFSDSKTINTIFGWVLHSALLVPYQAWAMSHSKHHKATGRMKKDIVFIPATRSYKGLPALEKPAVEEEVSEQEHHHHEESIFAETPIYTLGALLFVLTFGWPLYLIVNFSGHEAPHWVNHFQTVAPLYEPHQRKNIFYSNCGIVAMGSILTYLSMVFSPLTVFMYYGIPYLGVNAWIVCITYLQHTDPKVPHFRDNEWNFQRGAACTIDRSFGTIVNHLHHHIGDSHQCHHMFSQMPFYNAVEATKYLKAKLGKYYIFDDTPIAKALYRNWRECKFVEDEGDVVFYKH

SEQ ID NO: 731 - protein, 403 aa, Artificial sequence
  Delta-15 Desaturase
MAPPHVVDEQVRRRIVVEDEIKSKKQFERNYVPMDFTIKEIRDAIPAHLFIRDTTKSILHVVKDLVTIAIVFYCATFIETLPSLALRVPAWITYWIIQGTVMVGPWILAHECGHGAFSDSKTINTIFGWVLHSALLVPYQAWAMSHSKHHKGTGSMTKDVVFIPATRSYKGLPALEKPAVEEEVSEQEHHHHEESIFAETPIYSLIAFIIDQTFGWPLYLIVNFSGHEAPHWVNHFQTVAPLYEPHQRKNIFYSNCGIVAMGSILTYLSMVFSPLTVFMYYGIPYLGVNAWIVCITYLQHTDPKVPHFRDNEWNFQRGAACTIDRSFGTIVNHLHHHIGDSHQCHHMFSQMPFYNAVEATKYLKAKLGKYYIFDDTPIAKALYRNWRECKFVEDEGDVVFYKH

SEQ ID NO: 732 - protein, 403 aa, Artificial sequence
  Delta-15 Desaturase
MAPPHVVDEQVRRRIVVEDEIKSKKQFERNYVPMDFTIKEIRDAIPAHLFIRDTTKSILHVVKDLVTIAIVFYCATFIETLPSLALRVPAWITYWIIQGTVMVGPWILAHECGHGAFSKHRWFNTIFGWVLHSALLVPYQAWAMSHSKHHKVTGSMTKDVVFIPATRSYKGLPALEKPAVEEEVSEQEHHHHEESIFAETPIYTLGALLFVLTFGWPLYLIVNFSGHEAPHWVNHFQTVAPLYEPHQRKNIFYSNCGIVAMGSILTYLSMVFSPLTVFMYYGIPYLGVNAWIVCITYLQHTDPKVPHFRDNEWNFQRGAACTIDRSFGTIVNHLHHHIGDSHQCHHMFSQMPFYNAVEATKYLKAKLGKYYIFDDTPIAKALYRNWRECKFVEDEGDVVFYKH

SEQ ID NO: 733 - protein, 403 aa, Artificial sequence
  Delta-15 Desaturase
MAPPHVVDEQVRRRIVVEDEIKSKKQFERNYVPMDFTIKEIRDAIPAHLFIRDTTKSILHVVKDLVTIAIVFYCATFIETLPSLALRVPAWITYWIIQGTVMVGPWILAHECGHGAFSEPRSINSIMGWVLHSALLVPYQAWAMSHSKHHKATGAMTKDMVFIPATRSYKGLPALEKPAVEEEVSEQEHHHHEESIFAETPIYTLGALLFVLTFGWPLYLIVNFSGHEAPHWVNHFQTVAPLYEPHQRKNIFYSNCGIVAMGSILTYLSMVFSPLTVFMYYGIPYLGVNAWIVCITYLQHTDPKVPHFRDNEWNFQRGAACTIDRSFGTIVNHLHHHIGDSHQCHHMFSQMPFYNAVEATKYLKAKLGKYYIFDDTPIAKALYRNWRECKFVEDEGDVVFYKH

SEQ ID NO: 734 - protein, 403 aa, Artificial sequence
  Delta-15 Desaturase
MAPPHVVDEQVRRRIVVEDEIKSKKQFERNYVPMDFTIKEIRDAIPAHLFIRDTTKSILHVVKDLVTIAIVFYCATFIETLPSLALRVPAWITYWIIQGTVMVGPWILAHECGHGAFSKYRSINYIMGWVLHSALLVPYQAWAMSHSKHHKATGNMAKDMVFIPATRSYKGLPALEKPAVEEEVSEQEHHHHEESIFAETPIYTLGALLFVLTFGWPLYLIVNFSGHEAPHWVNHFQPTSAVFKARQRKNIFYSNCGIVAMGSILTYLSMVFSPLTVFMYYGIPYLGVNAWIVCITYLQHTDPKVPHFRDNEWNFQRGAACTIDRSFGTIVNHLHHHIGDSHQCHHMFSQMPFYNAVEATKYLKAKLGKYYIFDDTPIAKALYRNWRECKFVEDEGDVVFYKH

SEQ ID NO: 735 - protein, 403 aa, Artificial sequence
  Delta-15 Desaturase
MAPPHVVDEQVRRRIVVEDEIKSKKQFERNYVPMDFTIKEIRDAIPAHLFIRDTTKSILHVVKDLVTIAIVFYCATFIETLPSLALRVPAWITYWIIQGTVMVGPWILAHECGHGAFSDSKTINTIFGWVLHSALLVPYQAWAMSHSKHHKGTGSMTKDVVFIPATRSYKGLPALEKPAVEEEVSEQEHHHHEESIFAETPIYTLIAFIAHLTFGWPLYLIVNFSGHEAPHWVNHFQTVAPLYEPHQRKNIFYSNCGIVAMGSILTYLSMVFSPLTVFMYYGIPYLGVNAWIVCITYLQHTDPKVPHFRDNEWNFQRGAACTIDRSFGTIVNHLHHHIGDSHQCHHMFSQMPFYNAVEATKYLKAKLGKYYIFDDTPIAKALYRNWRECKFVEDEGDVVFYKH

SEQ ID NO: 736 - protein, 403 aa, Artificial sequence
  Delta-15 Desaturase
MAPPHVVDEQVRRRIVVEDEIKSKKQFERNYVPMDFTIKEIRDAIPAHLFIRDTTKSILHVVKDLVTIAIVFYCATFIETLPSLALRVPAWITYWIIQGTVMVGPWILAHECGHGAFSNPRTFNTIIGWVLHSALLVPYQAWAMSHSKHHKDTGTMAKDLVFIPATRSYKGLPALEKPAVEEEVSEQEHHHHEESIFAETPIYTLGALLFVLTFGWPLYLIVNFSGHEAPHWVNHFQTVAPLYEPHQRKNIFYSNCGIVAMGSILTYLSMVFSPLTVFMYYGIPYLGVNAWIVCITYLQHTDPKVPHFRDNEWNFQRGAACTIDRSFGTIVNHLHHHIGDSHQCHHMFSQMPFYNAVEATKYLKAKLGKYYIFDDTPIAKALYRNWRECKFVEDEGDVVFYKH

SEQ ID NO: 737 - protein, 403 aa, Artificial sequence
  Delta-15 Desaturase
MAPPHVVDEQVRRRIVVEDEIKSKKQFERNYVPMDFTIKEIRDAIPAHLFIRDTTKSILHVVKDLVTIAIVFYCATFIETLPSLALRVPAWITYWIIQGTVMVGPWILAHECGHGAFSHHKWFNTILGWVLHSALLVPYQAWAMSHSKHHKFTGTMAKDVVFIPATRSYKGLPALEKPAVEEEVSEQEHHHHEESIFAETPIYTLGALLFVLTFGWPLYLIVNFSGHEAPHWVNHFQSVSTLFEQRQRKNIFYSNCGIVAMGSILTYLSMVFSPLTVFMYYGIPYLGVNAWIVCITYLQHTDPKVPHFRDNEWNFQRGAACTIDRSFGTIVNHLHHHIGDSHQCHHMFSQMPFYNAVEATKYLKAKLGKYYIFDDTPIAKALYRNWRECKFVEDEGDVVFYKH

SEQ ID NO: 738 - protein, 403 aa, Artificial sequence
  Delta-15 Desaturase
MAPPHVVDEQVRRRIVVEDEIKSKKQFERNYVPMDFTIKEIRDAIPAHLFIRDTTKSILHVVKDLVTIAIVFYCATFIETLPSLALRVPAWITYWIIQGTVMVGPWILAHECGHGAFSDSKSINSIIGWVLHSALLVPYQAWAMSHSKHHKSTGTMTKDMVFIPATRSYKGLPALEKPAVEEEVSEQEHHHHEESIFAETPIYTLGALLFVLTFGWPLYLIVNFSGHEAPHWVNHFQTVAPLYEPHQRKNIFYSNCGIVAMGSILTYLSMVFSPLTVFMYYGIPYLGVNAWIVCITYLQHTDPKVPHFRDNEWNFQRGAACTIDRSFGTIVNHLHHHIGDSHQCHHMFSQMPFYNAVEATKYLKAKLGKYYIFDDTPIAKALYRNWRECKFVEDEGDVVFYKH

SEQ ID NO: 739 - protein, 403 aa, Artificial sequence
  Delta-15 Desaturase
MAPPHVVDEQVRRRIVVEDEIKSKKQFERNYVPMDFTIKEIRDAIPAHLFIRDTTKSILHVVKDLVTIAIVFYCATFIETLPSLALRVPAWITYWIIQGTVMVGPWILAHECGHGAFSHHKWFNTILGWVLHSALLVPYQAWAMSHSKHHKFTGTMAKDVVFIPATRSYKGLPALEKPAVEEEVSEQEHHHHEESIFAETPIYTLGALLFVLTFGWPLYLIVNFSGHEAPHWVNHFQTTSSFYKARQRKNIFYSNCGIVAMGSILTYLSMVFSPLTVFMYYGIPYLGVNAWIVCITYLQHTDPKVPHFRDNEWNFQRGAACTIDRSFGTIVNHLHHHIGDSHQCHHMFSQMPFYNAVEATKYLKAKLGKYYIFDDTPIAKALYRNWRECKFVEDEGDVVFYKH

SEQ ID NO: 740 - protein, 403 aa, Artificial sequence
  Delta-15 Desaturase
MAPPHVVDEQVRRRIVVEDEIKSKKQFERNYVPMDFTIKEIRDAIPAHLFIRDTTKSILHVVKDLVTIAIVFYCATFIETLPSLALRVPAWITYWIIQGTVMVGPWILAHECGHGAFSQSKSFNTILGWVLHSALLVPYQAWAMSHSKHHKATGGMKKDLVFIPATRSYKGLPALEKPAVEEEVSEQEHHHHEESIFAETPIYTLGALLFVLTFGWPLYLIVNFSGHEAPHWVNHFQTVAPLYEPHQRKNIFYSNCGIVAMGSILTYLSMVFSPLTVFMYYGIPYLGVNAWIVCITYLQHTDPKVPHFRDNEWNFQRGAACTIDRSFGTIVNHLHHHIGDSHQCHHMFSQMPFYNAVEATKYLKAKLGKYYIFDDTPIAKALYRNWRECKFVEDEGDVVFYKH

SEQ ID NO: 741 - protein, 403 aa, Artificial sequence
  Delta-15 Desaturase
MAPPHVVDEQVRRRIVVEDEIKSKKQFERNYVPMDFTIKEIRDAIPAHLFIRDTTKSILHVVKDLVTIAIVFYCATFIETLPSLALRVPAWITYWIIQGTVMVGPWILAHECGHGAFSDSKTINTIFGWVLHSALLVPYQAWAMSHSKHHKFTGPMSKDMVFIPATRSYKGLPALEKPAVEEEVSEQEHHHHEESIFAETPIYTLGALLFVLTFGWPLYLIVNFSGHEAPHWVNHFQTVAPLYEPHQRKNIFYSNCGIVAMGSILTYLSMVFSPLTVFMYYGIPYLGVNAWIVCITYLQHTDPKVPHFRDNEWNFQRGAACTIDRSFGTIVNHLHHHIGDSHQCHHMFSQMPFYNAVEATKYLKAKLGKYYIFDDTPIAKALYRNWRECKFVEDEGDVVFYKH

SEQ ID NO: 742 - protein, 403 aa, Artificial sequence
  Delta-15 Desaturase
MAPPHVVDEQVRRRIVVEDEIKSKKQFERNYVPMDFTIKEIRDAIPAHLFIRDTTKSILHVVKDLVTIAIVFYCATFIETLPSLALRVPAWITYWIIQGTVMVGPWILAHECGHGAFSDSKTINTIFGWVLHSALLVPYQAWAMSHSKHHKGTGSMTKDVVFIPATRSYKGLPALEKPAVEEEVSEQEHHHHEESIFAETPIYILVSFVFLQTFGWPLYLIVNFSGHEAPHWVNHFQTVAPLYEPHQRKNIFYSNCGIVAMGSILTYLSMVFSPLTVFMYYGIPYLGVNAWIVCITYLQHTDPKVPHFRDNEWNFQRGAACTIDRSFGTIVNHLHHHIGDSHQCHHMFSQMPFYNAVEATKYLKAKLGKYYIFDDTPIAKALYRNWRECKFVEDEGDVVFYKH

SEQ ID NO: 743 - protein, 403 aa, Artificial sequence
  Delta-15 Desaturase
MAPPHVVDEQVRRRIVVEDEIKSKKQFERNYVPMDFTIKEIRDAIPAHLFIRDTTKSILHVVKDLVTIAIVFYCATFIETLPSLALRVPAWITYWIIQGTVMVGPWILAHECGHGAFSKHRRINTIIGWVLHSALLVPYQALAMSHSKHHKGTGSMEKDLVFIPATRSYKGLPALEKPAVEEEVSEQEHHHHEESIFAETPIYTLGALLFVLTFGWPLYLIVNFSGHEAPHWVNHFQPIATIFEPRQRKNIFYSNCGIVAMGSILTYLSMVFSPLTVFMYYGIPYLGVNAWIVCITYLQHTDPKVPHFRDNEWNFQRGAACTIDRSFGTIVNHLHHHIGDSHQCHHMFSQMPFYNAVEATKYLKAKLGKYYIFDDTPIAKALYRNWRECKFVEDEGDVVFYKH

SEQ ID NO: 744 - protein, 403 aa, Artificial sequence
  Delta-15 Desaturase
MAPPHVVDEQVRRRIVVEDEIKSKKQFERNYVPMDFTIKEIRDAIPAHLFIRDTTKSILHVVKDLVTIAIVFYCATFIETLPSLALRVPAWITYWIIQGTVMVGPWILAHECGHGAFSKYKWFNSIIGWVLHSALLVPYQAWAMSHSKHHKFTGTMTKDVVFIPATRSYKGLPALEKPAVEEEVSEQEHHHHEESIFAETPIYTLGALLFVLTFGWPLYLIVNFSGHEAPHWVNHFQSIATLYKKNQRKNIFYSNCGIVAMGSILTYLSMVFSPLTVFMYYGIPYLGVNAWIVCITYLQHTDPKVPHFRDNEWNFQRGAACTIDRSFGTIVNHLHHHIGDSHQCHHMFSQMPFYNAVEATKYLKAKLGKYYIFDDTPIAKALYRNWRECKFVEDEGDVVFYKH

SEQ ID NO: 745 - protein, 403 aa, Artificial sequence
  Delta-15 Desaturase
MAPPHVVDEQVRRRIVVEDEIKSKKQFERNYVPMDFTIKEIRDAIPAHLFIRDTTKSILHVVKDLVTIAIVFYCATFIETLPSLALRVPAWITYWIIQGTVMVGPWILAHECGHGAFSKYKWFNSIIGWVLHSALLVPYQAWAMSHSKHHKFTGTMTKDVVFIPATRSYKGLPALEKPAVEEEVSEQEHHHHEESIFAETPIYTLGALLFVLTFGWPLYLIVNFSGHEAPHWVNHFQAVSPFFETRQRKNIFYSNCGIVAMGSILTYLSMVFSPLTVFMYYGIPYLGVNAWIVCITYLQHTDPKVPHFRDNEWNFQRGAACTIDRSFGTIVNHLHHHIGDSHQCHHMFSQMPFYNAVEATKYLKAKLGKYYIFDDTPIAKALYRNWRECKFVEDEGDVVFYKH

SEQ ID NO: 746 - protein, 403 aa, Artificial sequence
  Delta-15 Desaturase
MAPPHVVDEQVRRRIVVEDEIKSKKQFERNYVPMDFTIKEIRDAIPAHLFIRDTTKSILHVVKDLVTIAIVFYCATFIETLPSLALRVPAWITYWIIQGTVMVGPWILAHECGHGAFSEYTSFNSIIGWVLHSALLVPYQAWAMSHSKHHKFTGTMAKDVVFIPATRSYKGLPALEKPAVEEEVSEQEHHHHEESIFAETPIYTLGALLFVLTFGWPLYLIVNFSGHEAPHWVNHFQTVAPLYEPHQRKNIFYSNCGIVAMGSILTYLSMVFSPLTVFMYYGIPYLGVNAWIVCITYLQHTDPKVPHFRDNEWNFQRGAACTIDRSFGTIVNHLHHHIGDSHQCHHMFSQMPFYNAVEATKYLKAKLGKYYIFDDTPIAKALYRNWRECKFVEDEGDVVFYKH

SEQ ID NO: 747 - protein, 403 aa, Artificial sequence
  Delta-15 Desaturase
MAPPHVVDEQVRRRIVVEDEIKSKKQFDRNYVPMDFTIKEIRDAIPAHLFIRDTTKSILHVVKDLVTIAIVFYCATFIETLPSLALRVPAWITYWIIQGTVMVGPWILAHECGHGAFSEYTSFNYIFGWVLHSALLVPYQAWAMSHSKHHKFTGSMAKDLVFIPATRSYKGLPALEKPAVEEEVSEQEHHHHEESIFAETTIYTLGALLFVLTFGWPLYLIVNFSGHEAPHWVNHFQTVAPLYEPHQRKNIFYSNCGIVAMGSILTYLSMVFSPLTVFMYYGIPYLGVNAWIVCITYLQHTDPKVPHFRDNEWNFQRGAACTIDRSFGTIVNHLHHHIGDSHQCHHMFSQMPFYNAVEATKYLKAKLGKYYIFDDTPIAKALYRNWRECKFVEDEGDVVFYKH

SEQ ID NO: 748 - protein, 403 aa, Artificial sequence
  Delta-15 Desaturase
MAPPHVVDEQVRRRIVVEDEIKSKKQFERNYVPMDFTIKEIRDAIPAHLFIRDTTKSILHVVKDLVTIAIVFYCATFIETLPSLALRVPAWITYWIIQGTVMVGPWILAHECGHGAFSDSRWINNIMGWVLHSALLVPYQAWAMSHSKHHKSTGTMTKDVVFIPATRSYKGLPALEKPAVEEEVSEQEHHHHEESIFAETPIYTLGALLFVLTFGWPLYLIVNFSGHEAPHWVNHFQTVAPLYEPHQRKNIFYSNCGIVAMGSILTYLSMVFSPLTVFMYYGIPYLGVNAWIVCITYLQHTDPKVPHFRDNEWNFQRGAACTIDRSFGTIVNHLHHHIGDSHQCHHMFSQMPFYNAVEATKYLKAKLGKYYIFDDTPIAKALYRNWRECKFVEDEGDVVFYKH

SEQ ID NO: 749 - protein, 403 aa, Artificial sequence
  Delta-15 Desaturase
MAPPHVVDEQVRRRIVVEDEIKSKKQFERNYVPMDFTIKEIRDAIPAHLFIRDTTKSILHVVKDLVTIAIVFYCATFIETLPSLALRVPAWITYWIIQGTVMVGPWILAHECGHGAFSQSKTINTILGWVLHSALLVPYQAWAMSHSKHHKATGTMTKDVVFIPATRSYKGLPALEKPAVEEEVSEQEHHHHEESIFAETPIYTLGALLFVLTFGWPLYLIVNFSGHEAPHWVNHFQTVAPLYEPHQRKNIFYSNCGIVAMGSILTYLSMVFSPLTVFMYYGIPYLGFNAWIVCITYLQHTDPKVPHFRDNEWNFQRGAACTIDRSFGTIVNHLHHHIGDSHQCHHMFSQMPFYNAVEATKYLKAKLGKYYIFDDTPIAKALYRNWRECKFVEDEGDVVFYKH

SEQ ID NO: 750 - protein, 403 aa, Artificial sequence
  Delta-15 Desaturase
MAPPHVVDEQVRRRIVVEDEIKSKKQFERNYVPMDFTIKEIRDAIPAHLFIRDTTKSILHVVKDLVTIAIVFYCATFIETLPSLALRVPAWITYWIIQGTVMVGPWILAHECGHGAFSKYRSINYIMGWVLHSALLVPYQAWAMSHSKHHKATGNMAKDMVFIPATRSYKGLPALEKPAVEEEVSEQEHHHHEESIFAETPIYTLGALLFVLTFGWPLYLIVNFSGHEAPHWVNHFQAASTVYEQQQRKNIFYSNCGIVAMGSILTYLSMVFSPLTVFMYYGIPYLGVNAWIVCITYLQHTDPKVPHFRDNEWNFQRGAACTIDRSFGTIVNHLHHHIGDSHQCHHMFSQMPFYNAVEATKYLKAKLGKYYIFDDTPIAKALYRNWRECKFVEDEGDVVFYKH

SEQ ID NO: 751 - protein, 403 aa, Artificial sequence
  Delta-15 Desaturase
MAPPHVVDEQVRRRIVVEDEIKSKKQFERNYVPMDFTIKEIRDAIPAHLFIRDTTKSILHVVKDLVTIAIVFYCATFIETLPSLALRVPAWITYWIIQGTVMVGPWILAHECGHGAFSDSKTINTIFGWVLHSALLVPYQAWAMSHSKHHKVTGTMEKDLVFIPATRSYKGLPALEKPAVEEEVSEQEHHHHEESIFAETPIYTLGALLFVLTFGWPLYLIVNFSGHEAPHWVNHFQTVAPLYEPHQRKNIFYSNCGIVAMGSILTYLSMVFSPLTVFMYYGIPYLGVNAWIVCITYLQHTDPKVPHFRDNEWNFQRGAACTIDRSFGTIVNHLHHHIGDSHQCHHMFSQMPFYNAVEATKYLKAKLGKYYIFDDTPIAKALYRNWRECKFVEDEGDVVFYKH

SEQ ID NO: 752 - protein, 403 aa, Artificial sequence
  Delta-15 Desaturase
MAPPHVVDEQVRRRIVVEDEIKSKKQFERNYVPMDFTIKEIRDAIPAHLFIRDTTKSILHVVKDLVTIAIVFYCATFIETLPSLALRVPAWITYWIIQGTVMVGPWILAHECGHGAFSKYKWFNSIIGWVLHSALLVPYQAWAMSHSKHHKFTGTMTKDVVFIPATRSYKGLPALEKPAVEEEVSEQEHHHHEESIFAETPIYTLGALLFVLTFGWPLYLIVNFSGHEAPHWVNHFQATATLFRQKQRKNIFYSNCGIVAMGSILTYLSMVFSPLTVFMYYGIPYLGVNAWIVCITYLQHTDPKVPHFRDNEWNFQRGAACTIDRSFGTIVNHLHHHIGDSHQCHHMFSQMPFYNAVEATKYLKAKLGKYYIFDDTPIAKALYRNWRECKFVEDEGDVVFYKH

SEQ ID NO: 753 - protein, 403 aa, Artificial sequence
  Delta-15 Desaturase
MAPPHVVDEQVRRRIVVEDEIKSKKQFERNYVPMDFTIKEIRDAIPAHLFIRDTTKSILHVVKDLVTIAIVFYCATFIETLPSLALRVPAWITYWIIQGTVMVGPWILAHECGHGAFSKYRTFNTIFGWVLHSALLVPYQAWAMSHSKHHKYTGTMSKDIVFIPATRSYKGLPALEKPAVEEEVSEQEHHHHEESIFAETPIYTLGALLFVLTFGWPLYLIVNFSGHEAPHWVNHFQTVAPLYEPHQRKNIFYSNCGIVAMGSILTYLSMVFSPLTVFMYYGIPYLGVNAWIVCITYLQHTDPKVPHFRDNEWNFQRGAACTIDRSFGTIVNHLHHHIGDSHQCHHMFSQMPFYNAVEATKYLKAKLGKYYIFDDTPIAKALYRNWRECKFVEDEGDVVFYKH

SEQ ID NO: 754 - protein, 403 aa, Artificial sequence
  Delta-15 Desaturase
MAPPHVVDEQVRRRIVVEDEIKSKKQFERNYVPMDFTIKEIRDAIPAHLFIRDTTKSILHVVKDLVTIAIVFYCATFIETLPSLALRVPAWITYWIIQGTVMVGPWILAHECGHGAFSDSKTINTIFGWVLHSALLVPYQAWAMSHSKHHKGTGSMTKDVVFIPATRSYKGLPALEKPAVEEEVSEQEHHHHEESIFAETPIYSLVAFVALQTFGWPLYLIVNFSGHEAPHWVNHFQTVAPLYEPHQRKNIFYSNCGIVAMGSILTYLSMVFSPLTVFMYYGIPYLGVNAWIVCITYLQHTDPKVPHFRDNEWNFQRGAACTIDRSFGTIVNHLHHHIGDSHQCHHMFSQMPFYNAVEATKYLKAKLGKYYIFDDTPIAKALYRNWRECKFVEDEGDVVFYKH

SEQ ID NO: 755 - protein, 403 aa, Artificial sequence
  Delta-15 Desaturase
MAPPHVVDEQVRRRIVVEDEIKSKKQFERNYVPMDFTIKEIRDAIPAHLFIRDTTKSILHVVKDLVTIAIVFYCATFIETLPSLALRVPAWITYWIIQGTVMVGPWILAHECGHGAFSHHKWFNTILGWVLHSALLVPYQAWAMSHSKHHKFTGTMAKDVVFIPATRSYKGLPALEKPAVEEEVSEQEHHHHEESIFAETPIYTLGALLFVLTFGWPLYLIVNFSGHEAPHWVNHFQAVSTLYETRQRKNIFYSNCGIVAMGSILTYLSMVFSPLTVFMYYGIPYLGVNAWIVCITYLQHTDPKVPHFRDNEWNFQRGAACTIDRSFGTIVNHLHHHIGDSHQCHHMFSQMPFYNAVEATKYLKAKLGKYYIFDDTPIAKALYRNWRECKFVEDEGDVVFYKH

SEQ ID NO: 756 - protein, 403 aa, Artificial sequence
  Delta-15 Desaturase
MAPPHVVDEQVRRRIVVEDEIKSKKQFERNYVPMDFTIKEIRDAIPAHLFIRDTTKSILHVVKDLVTIAIVFYCATFIETLPSLALRVPAWITYWIIQGTVMVGPWILAHECGHGAFSKHTTINNILGWVLHSALLVPYQAWAMSHSKHHKCTGPMSKDVVFIPATRSYKGLPALEKPAVEEEVSEQEHHHHEESIFAETPIYTLGALLFVLTFGWPLYLIVNFSGHEAPHWVNHFQTVAPLYEPHQRKNIFYSNCGIVAMGSILTYLSMVFSPLTVFMYYGIPYLGVNAWIVCITYLQHTDPKVPHFRDNEWNFQRGAACTIDRSFGTIVNHLHHHIGDSHQCHHMFSQMPFYNAVEATKYLKAKLGKYYIFDDTPIAKALYRNWRECKFVEDEGDVVFYKH

SEQ ID NO: 757 - protein, 403 aa, Artificial sequence
  Delta-15 Desaturase
MAPPHVVDEQVRRRIVVEDEIKSKKQFERNYVPMDFTIKEIRDAIPAHLFIRDTTKSILHVVKDLVTIAIVFYCATFIETLPSLALRVPAWITYWIIQGTVMVGPWILAHECGHGAFSKYRSINYIMGWVLHSALLVPYQAWAMSHSKHHKATGNMAKDMVFIPATRSYKGLPALEKPAVEEEVSEQEHHHHEESIFAETPIYTLGALLFVLTFGWPLYLIVNFSGHEAPHWVNHFQAVSPVYGTQQRKNIFYSNCGIVAMGSILTYLSMVFSPLTVFMYYGIPYLGVNAWIVCITYLQHTDPKVPHFRDNEWNFQRGAACTIDRSFGTIVNHLHHHIGDSHQCHHMFSQMPFYNAVEATKYLKAKLGKYYIFDDTPIAKALYRNWRECKFVEDEGDVVFYKH

SEQ ID NO: 758 - protein, 403 aa, Artificial sequence
  Delta-15 Desaturase
MAPPHVVDEQVRRRIVVEDEIKSKKQFERNYVPMDFTIKEIRDAIPAHLFIRDTTKSILHVVKDLVTIAIVFYCATFIETLPSLALRVPAWITYWIIQGTVMVGPWILAHECGHGAFSKYRSINYIMGWVLHSALLVPYQAWAMSHSKHHKATGNMAKDMVFIPATRSYKGLPALEKPAVEEEVSEQEHHHHEESIFAETPIYTLGALLFVLTFGWPLYLIVNFSGHEAPHWVNHFQAIASFYTERQRKNIFYSNCGIVAMGSILTYLSMVFSPLTVFMYYGIPYLGVNAWIVCITYLQHTDPKVPHFRDNEWNFQRGAACTIDRSFGTIVNHLHHHIGDSHQCHHMFSQMPFYNAVEATKYLKAKLGKYYIFDDTPIAKALYRNWRECKFVEDEGDVVFYKH

SEQ ID NO: 759 - protein, 403 aa, Artificial sequence
  Delta-15 Desaturase
MAPPHVVDEQVRRRIVVEDEIKSKKQFERNYVPMDFTIKEIRDAIPAHLFIRDTTKSILHVVKDLVTIAIVFYCATFIETLPSLALRVPAWITYWIIQGTVMVGPWILAHECGHGAFSNHRWINTIMGWVLHSALLVPYQAWAMSHSKHHKSTGRMTKDVVFIPATRSYKGLPALEKPAVEEEVSEQEHHHHEESIFAETPIYTLGALLFVLTFGWPLYLIVNFSGHEAPHWVNHFQTVAPLYEPHQRKNIFYSNCGIVAMGSILTYLSMVFSPLTVFMYYGIPYLGVNAWIVCITYLQHTDPKVPHFRDNEWNFQRGAACTIDRSFGTIVNHLHHHIGDSHQCHHMFSQMPFYNAVEATKYLKAKLGKYYIFDDTPIAKALYRNWRECKFVEDEGDVVFYKH

SEQ ID NO: 760 - protein, 403 aa, Artificial sequence
  Delta-15 Desaturase
MAPPHVVDEQVRRRIVVEDEIKSKKQFERNYVPMDFTIKEIRDAIPAHLFIRDTTKSILHVVKDLVTIAIVFYCATFIETLPSLALRVPAWITYWIIQGTVMVGPWILAHECGHGAFSKYRSINYIMGWVLHSALLVPYQAWAMSHSKHHKATGNMAKDMVFIPATRSYKGLPALEKPAVEEEVSEQEHHHHEESIFAETPIYTLGALLFVLTFGWPLYLIVNFSGHEAPHWVNHFQSGTTVFTQRQRKNIFYSNCGIVAMGSILTYLSMVFSPLTVFMYYGIPYLGVNAWIVCITYLQHTDPKVPHFRDNEWNFQRGAACTIDRSFGTIVNHLHHHIGDSHQCHHMFSQMPFYNAVEATKYLKAKLGKYYIFDDTPIAKALYRNWRECKFVEDEGDVVFYKH

SEQ ID NO: 761 - protein, 403 aa, Artificial sequence
  Delta-15 Desaturase
MAPPHVVDEQVRRRIVVEDEIKSKKQFERNYVPMDFTIKEIRDAIPAHLFIRDTTKSILHVVKDLVTIAIVFYCATFIETLPSLALRVPAWITYWIIQGTVMVGPWILAHECGHGAFSNHKSFNTILGWVLHSALLVPYQAWAMSHSKHHKGTGGMKKDFVFIPATRSYKGLPALEKPAVEEEVSEQEHHHHEESIFAETPIYTLGALLFVLTFGWPLYLIVNFSGHEAPHWVNHFQTVAPLYEPHQRKNIFYSNCGIVAMGSILTYLSMVFSPLTVFMYYGIPYLGVNAWIVCITYLQHTDPKVPHFRDNEWNFQRGAACTIDRSFGTIVNHLHHHIGDSHQCHHMFSQMPFYNAVEATKYLKAKLGKYYIFDDTPIAKALYRNWRECKFVEDEGDVVFYKH

SEQ ID NO: 762 - protein, 403 aa, Artificial sequence
  Delta-15 Desaturase
MAPPHVVDEQVRRRIVVEDEIKSKKQFERNYVPMDFTIKEIRDAIPAHLFIRDTTKSILHVVKDLVTIAIVFYCATFIETLPSLALRVPAWITYWIIQGTVMVGPWILAHECGHGAFSDSKWINTIIGWVLHSALLVPYQAWAMSHSKHHKSTGPMSKDVVFIPATRSYKGLPALEKPAVEEEVSEQEHHHHEESIFAETPIYTLGALLFVLTFGWPLYLIVNFSGHEAPHWVNHFQTVAPLYEPHQRKNIFYSNCGIVAMGSILTYLSMVFSPLTVFMYYGIPYLGVNAWIVCITYLQHTDPKVPHFRDNEWNFQRGAACTIDRSFGTIVNHLHHHIGDSHQCHHMFSQMPFYNAVEATKYLKAKLGKYYIFDDTPIAKALYRNWRECKFVEDEGDVVFYKH

SEQ ID NO: 763 - protein, 403 aa, Artificial sequence
  Delta-15 Desaturase
MAPPHVVDEQVRRRIVVEDEIKSKKQFERNYVPMDFTIKEIRDAIPAHLFIRDTTKSILHVVKDLVTIAIVFYCATFIETLPSLALRVPAWITYWIIQGTVMVGPWILAHECGHGAFSKPRTFNNILGWVLHSALLVPYQAWAMSHSKHHKDTGTMKKDVVFIPATRSYKGLPALEKPAVEEEVSEQEHHHHEESIFAETPIYTLGALLFVLTFGWPLYLIVNFSGHEAPHWVNHFQTVAPLYEPHQRKNIFYSNCGIVAMGSILTYLSMVFSPLTVFMYYGIPYLGVNAWIVCITYLQHTDPKVPHFRDNEWNFQRGAACTIDRSFGTIVNHLHHHIGDSHQCHHMFSQMPFYNAVEATKYLKAKLGKYYIFDDTPIAKALYRNWRECKFVEDEGDVVFYKH

SEQ ID NO: 764 - protein, 403 aa, Artificial sequence
  Delta-15 Desaturase
MAPPHVVDEQVRRRIVVEDEIKSKKQFERNYVPMDFTIKEIRDAIPAHLFIRDTTKSILHVVKDLVTIAIVFYCATFIETLPSLALRVPAWITYWIIQGTVMVGPWILAHECGHGAFSNPKRFNYIMGWVLHSALLVPYQAWAMSHSKHHKSTGRMSKDVVFIPATRSYKGLPALEKPAVEEEVSEQEHHHHEESIFAETPIYTLGALLFVLTFGWPLYLIVNFSGHEAPHWVNHFQTVAPLYEPHQRKNIFYSNCGIVAMGSILTYLSMVFSPLTVFMYYGIPYLGVNAWIVCITYLQHTDPKVPHFRDNEWNFQRGAACTIDRSFGTIVNHLHHHIGDSHQCHHMFSQMPFYNAVEATKYLKAKLGKYYIFDDTPIAKALYRNWRECKFVEDEGDVVFYKH

SEQ ID NO: 765 - protein, 403 aa, Artificial sequence
  Delta-15 Desaturase
MAPPHVVDEQVRRRIVVEDEIKSKKQFERNYVPMDFTIKEIRDAIPAHLFIRDTTKSILHVVKDLVTIAIVFYCATFIETLPSLALRVPAWITYWIIQGTVMVGPWILAHECGHGAFSKYRSINYIMGWVLHSALLVPYQAWAMSHSKHHKATGNMAKDMVFIPATRSYKGLPALEKPAVEEEVSEQEHHHHEESIFAETPIYTLGALLFVLTFGWPLYLIVNFSGHEAPHWVNHFQSITPLYKNRQRKNIFYSNCGIVAMGSILTYLSMVFSPLTVFMYYGIPYLGVNAWIVCITYLQHTDPKVPHFRDNEWNFQRGAACTIDRSFGTIVNHLHHHIGDSHQCHHMFSQMPFYNAVEATKYLKAKLGKYYIFDDTPIAKALYRNWRECKFVEDEGDVVFYKH

SEQ ID NO: 766 - protein, 403 aa, Artificial sequence
  Delta-15 Desaturase
MAPPHVVDEQVRRRIVVEDEIKSKKQFERNYVPMDFTIKEIRDAIPAHLFIRDTTKSILHVVKDLVTIAIVFYCATFIETLPSLALRVPAWITYWIIQGTVMVGPWILAHECGHGAFSEHTTINTIFGWVLHSALLVPYQAWAMSHSKHHKVTGDMSKDVVFIPATRSYKGLPALEKPAVEEEVSEQEHHHHEESIFAETPIYTLGALLFVLTFGWPLYLIVNFSGHEAPHWVNHFQTVAPLYEPHQRKNIFYSNCGIVAMGSILTYLSMVFSPLTVFMYYGIPYLGVNAWIVCITYLQHTDPKVPHFRDNEWNFQRGAACTIDRSFGTIVNHLHHHIGDSHQCHHMFSQMPFYNAVEATKYLKAKLGKYYIFDDTPIAKALYRNWRECKFVEDEGDVVFYKH

SEQ ID NO: 767 - protein, 403 aa, Artificial sequence
  Delta-15 Desaturase
MAPPHVVDEQVRRRIVVEDEIKSKKQFERNYVPMDFTIKEIRDAIPAHLFIRDTTKSILHVVKDLVTIAIVFYCATFIETLPSLALRVPAWITYWIIQGTVMVGPWILAHECGHGAFSQPTTINSIIGWVLHSALLVPYQAWAMSHSKHHKFTGTMAKDVVFIPATRSYKGLPALEKPAVEEEVSEQEHHHHEESIFAETPIYTLGALLFVLTFGWPLYLIVNFSGHEAPHWVNHFQTVAPLYEPHQRKNIFYSNCGIVAMGSILTYLSMVFSPLTVFMYYGIPYLGVNAWIVCITYLQHTDPKVPHFRDNEWNFQRGAACTIDRSFGTIVNHLHHHIGDSHQCHHMFSQMPFYNAVEATKYLKAKLGKYYIFDDTPIAKALYRNWRECKFVEDEGDVVFYKH

SEQ ID NO: 768 - protein, 403 aa, Artificial sequence
  Delta-15 Desaturase
MAPPHVVDEQVRRRIVVEDEIKSKKQFERNYVPMDFTIKEIRDAIPAHLFIRDTTKSILHVVKDLVTIAIVFYCATFIETLPSLALRVPAWITYWIIQGTVMVGPWILAHECGHGAFSDYKRINTIFGWVLHSALLVPYQAWAMSHSKHHKYTGPMEKDLVFIPATRSYKGLPALEKPAVEEEVSEQEHHHHEESIFAETPIYTLGALLFVLTFGWPLYLIVNFSGHEAPHWVNHFQTVAPLYEPHQRKNIFYSNCGIVAMGSILTYLSMVFSPLTVFMYYGIPYLGVNAWIVCITYLQHTDPKVPHFRDNEWNFQRGAACTIDRSFGTIVNHLHHHIGDSHQCHHMFSQMPFYNAVEATKYLKAKLGKYYIFDDTPIAKALYRNWRECKFVEDEGDVVFYKH

SEQ ID NO: 769 - protein, 403 aa, Artificial sequence
  Delta-15 Desaturase
MAPPHVVDEQVRRRIVVEDEIKSKKQFERNYVPMDFTIKEIRDAIPAHLFIRDTTKSILHVVKDLVTIAIVFYCATFIETLPSLALRVPAWITYWIIQGTVMVGPWILAHECGHGAFSDHKWFNSIIGWVLHSALLVPYQAWAMSHSKHHKFTGSMAKDLVFIPATRSYKGLPALEKPAVEEEVSEQEHHHHEESIFAETPIYTLGALLFVLTFGWPLYLIVNFSGHEAPHWVNHFQTVAPLYEPHQRKNIFYSNCGIVAMGSILTYLSMVFSPLTVFMYYGIPYLGVNAWIVCITYLQHTDPKVPHFRDNEWNFQRGAACTIDRSFGTIVNHLHHHIGDSHQCHHMFSQMPFYNAVEATKYLKAKLGKYYIFDDTPIAKALYRNWRECKFVEDEGDVVFYKH

SEQ ID NO: 770 - protein, 403 aa, Artificial sequence
  Delta-15 Desaturase
MAPPHVVDEQVRRRIVVEDEIKSKKQFERNYVPMDFTIKEIRDAIPAHLFIRDTTKSILHVVKDLVTIAIVFYCATFIETLPSLALRVPAWITYWIIQGTVMVGPWILAHECGHGAFSDPRTFNNIIGWVLHSALLVPYQAWAMSHSKHHKVTGAMAKDMVFIPATRSYKGLPALEKPAVEEEVSEQEHHHHEESIFAETPIYTLGALLFVLTFGWPLYLIVNFSGHEAPHWVNHFQTVAPLYEPHQRKNIFYSNCGIVAMGSILTYLSMVFSPLTVFMYYGIPYLGVNAWIVCITYLQHTDPKVPHFRDNEWNFQRGAACTIDRSFGTIVNHLHHHIGDSHQCHHMFSQMPFYNAVEATKYLKAKLGKYYIFDDTPIAKALYRNWRECKFVEDEGDVVFYKH

SEQ ID NO: 771 - protein, 403 aa, Artificial sequence
  Delta-15 Desaturase
MAPPHVVDEQVRRRIVVEDEIKSKKQFERNYVPMDFTIKEIRDAIPAHLFIRDTTKSILHVVKDLVTIAIVFYCATFIETLPSLALRVPAWITYWIIQGTVMVGPWILAHECGHGAFSDSKTINTIFGWVLHSALLVPYQAWAMSHSKHHKSTGPMEKDMVFIPATRSYKGLPALEKPAVEEEVSEQEHHHHEESIFAETPIYTLGALLFVLTFGWPLYLIVNFSGHEAPHWVNHFQTVAPLYEPHQRKNIFYSNCGIVAMGSILTYLSMVFSPLTVFMYYGIPYLGVNAWIVCITYLQHTDPKVPHFRDNEWNFQRGAACTIDRSFGTIVNHLHHHIGDSHQCHHMFSQMPFYNAVEATKYLKAKLGKYYIFDDTPIAKALYRNWRECKFVEDEGDVVFYKH

SEQ ID NO: 772 - protein, 403 aa, Artificial sequence
  Delta-15 Desaturase
MAPPHVVDEQVRRRIVVEDEIKSKKQFERNYVPMDFTIKEIRDAIPAHLFIRDTTKSILHVVKDLVTIAIVFYCATFIETLPSLALRVPAWITYWIIQGTVMVGPWILAHECGHGAFSKYRSINYIMGWVLHSALLVPYQAWAMSHSKHHKATGNMAKDMVFIPATRSYKGLPALEKPAVEEEVSEQEHHHHEESIFAETPIYTLGALLFVLTFGWPLYLIVNFSGHEAPHWVNHFQPISTFFATRQRKNIFYSNCGIVAMGSILTYLSMVFSPLTVFMYYGIPYLGVNAWIVCITYLQHTDPKVPHFRDNEWNFQRGAACTIDRSFGTIVNHLHHHIGDSHQCHHMFSQMPFYNAVEATKYLKAKLGKYYIFDDTPIAKALYRNWRECKFVEDEGDVVFYKH

SEQ ID NO: 773 - protein, 403 aa, Artificial sequence
  Delta-15 Desaturase
MAPPHVVDEQVRRRIVVEDEIKSKKQFERNYVPMDFTIKEIRDAIPAHLFIRDTTKSILHVVKDLVTIAIVFYCATFIETLPSLALRVPAWITYWIIQGTVMVGPWILAHECGHGAFSHYRRFNSILGWVLHSALLVPYQAWAMSHSKHHKFTGTMAKDVVFIPATRSYKGLPAVYYVYLHEEVSEQEHHHHEESIFAETPIYTLGALLFVLTFGWPLYLIVNFSGHEAPHWVNHFQTVAPLYEPHQRKNIFYSNCGIVAMGSILTYLSMVFSPLTVFMYYGIPYLGVNAWIVCITYLQHTDPKVPHFRDNEWNFQRGAACTIDRSFGTIVNHLHHHIGDSHQCHHMFSQMPFYNAVEATKYLKAKLGKYYIFDDTPIAKALYRNWRECKFVEDEGDVVFYKH

SEQ ID NO: 774 - protein, 403 aa, Artificial sequence
  Delta-15 Desaturase
MAPPHVVDEQVRRRIVVEDEIKSKKQFERNYVPMDFTIKEIRDAIPAHLFIRDTTKSILHVVKDLVTIAIVFYCATFIETLPSLALRVPAWITYWIIQGTVMVGPWILAHECGHGAFSNSKSFNSIFGWVLHSALLVPYQAWAMSHSKHHKFTGPMKKDIVFIPATRSYKGLPALEKPAVEEEVSEQEHHHHEESIFAETPIYTLGALLFVLTFGWPLYLIVNFSGHEAPHWVNHFQTVAPLYEPHQRKNIFYSNCGIVAMGSILTYLSMVFSPLTVFMYYGIPYLGVNAWIVCITYLQHTDPKVPHFRDNEWNFQRGAACTIDRSFGTIVNHLHHHIGDSHQCHHMFSQMPFYNAVEATKYLKAKLGKYYIFDDTPIAKALYRNWRECKFVEDEGDVVFYKH

SEQ ID NO: 775 - protein, 403 aa, Artificial sequence
  Delta-15 Desaturase
MAPPHVVDEQVRRRIVVEDEIKSKKQFERNYVPMDFTIKEIRDAIPAHLFIRDTTKSILHVVKDLVTIAIVFYCATFIETLPSLALRVPAWITYWIIQGTVMVGPWILAHECGHGAFSKHKTFNYIFGWVLHSALLVPYQAWAMSHSKHHKATGTMTNDVVFIPATRSYKGLPALEKPAVEEEVSEQEHHHHEESIFAETPIYTLGALLFVLTFGWPLYLIVNFSGHEAPHWVNHFQTVAPLYEPHQRKNIFYSNCGIVAMGSILTYLSMVFSPLTVFMYYGIPYLGVNAWIVCITYLQHTDPKVPHFRDNEWNFQRGAACTIDRSFGTIVNHLHHHIGDSHQCHHMFSQMPFYNAVEATEYLKAKLGKYYIFDDTPIAKALYRNWRECKFVEDEGDVVFYKH

SEQ ID NO: 776 - protein, 403 aa, Artificial sequence
  Delta-15 Desaturase
MAPPHVVDEQVRRRIVVEDEIKSKKQFERNYVPMDFTIKEIRDAIPAHLFIRDTTKSILHVVKDLVTIAIVFYCATFIETLPSLALRVPAWITYWIIQGTVMVGPWILAHECGHGAFSDSKTINTIFGWVLHSALLVPYQAWAMSHSKHHKDTGPMTKDMVFIPATRSYKGLPALEKPAVEEEVSEQEHHHHEESIFAETPIYTLGALLFVLTFGWPLYLIVNFSGHEAPHWVNHFQTVAPLYEPHQRKNIFYSNCGIVAMGSILTYLSMVFSPLTVFMYYGIPYLGVNAWIVCITYLQHTDPKVPHFRDNEWNFQRGAACTIDRSFGTIVNHLHHHICDSHQCHHMFSQMPFYNAVEATKYLKAKLGKYYIFDDTPIAKALYRNWRECKFVEDEGDVVFYKH

SEQ ID NO: 777 - protein, 403 aa, Artificial sequence
  Delta-15 Desaturase
MAPPHVVDEQVRRRIVVEDEIKSKKQFERNYVPMDFTIKEIRDAIPAHLFIRDTTKSILHVVKDLVTIAIVFYCATFIETLPSLALRVPAWITYWIIQGTVMVGPWILAHECGHGAFSDSKTINTIFGWVLHSALLVPYQAWAMSHSKHHKGTGSMTKDVVFIPATRSYKGLPALEKPAVEEEVSEQEHHHHEESIFAETPIYNLISFVVHLTFGWPLYLIVNFSGHEAPHWVNHFQTVAPLYEPHQRKNIFYSNCGIVAMGSILTYLSMVFSPLTVFMYYGIPYLGVNAWIVCITYLQHTDPKVPHFRDNEWNFQRGAACTIDRSFGTIVNHLHHHIGDSHQCHHMFSQMPFYNAVEATKYLKAKLGKYYIFDDTPIAKALYRNWRECKFVEDEGDVVFYKH

SEQ ID NO: 778 - protein, 403 aa, Artificial sequence
  Delta-15 Desaturase
MAPPHVVDEQVRRRIVVEDEIKSKKQFERNYVPMDFTIKEIRDAIPAHLFIRDTTKSILHVVKDLVTIAIVFYCATFIETLPSLALRVPAWITYWIIQGTVMVGPWILAHECGHGAFSHYRRFNSILGWVLHSALLVPYQAWAMSHSKHHKFTGTMAKDVVFIPATRSYKGLPAVSDAYWHEEVSEQEHHHHEESIFAETPIYTLGALLFVLTFGWPLYLIVNFSGHEAPHWVNHFQTVAPLYEPHQRKNIFYSNCGIVAMGSILTYLSMVFSPLTVFMYYGIPYLGVNAWIVCITYLQHTDPKVPHFRDNEWNFQRGAACTIDRSFGTIVNHLHHHIGDSHQCHHMFSQMPFYNAVEATKYLKAKLGKYYIFDDTPIAKALYRNWRECKFVEDEGDVVFYKH

SEQ ID NO: 779 - protein, 403 aa, Artificial sequence
  Delta-15 Desaturase
MAPPHVVDEQVRRRIVVEDEIKSKKQFERNYVPMDFTIKEIRDAIPAHLFIRDTTKSILHVVKDLVTIAIVFYCATFIETLPSLALRVPAWITYWIIQGTVMVGPWILAHECGHGAFSDSKTINTIFGWVLHSALLVPYQAWAMSHSKHHKDTGTMSKDVVFIPATRSYKGLPALEKPAVEEEVSEQEHHHHEESIFAETPIYTLGALLFVLTFGWPLYLIVNFSGHEAPHWVNHFQTVAPLYEPHQRKNIFYSNCGIVAMGSILTYLSMVFSPLTVFMYYGIPYLGVNAWIVCITYLQHTDPKVPHFRDNEWNFQRGAACTIDRSFGTIVNHLHHHIGDSHQCHHMFSQMPFYNAVEATKYLKAKLGKYYIFDDTPIAKALYRNWRECKFVEDEGDVVFYKH

SEQ ID NO: 780 - protein, 403 aa, Artificial sequence
  Delta-15 Desaturase
MAPPHVVDEQVRRRIVVEDEIKSKKQFERNYVPMDFTIKEIRDAIPAHLFIRDTTKSILHVVKDLVTIAIVFYCATFIETLPSLALRVPAWITYWIIQGTVMVGPWILAHECGHGAFSDSKTINTIFGWVLHSALLVPYQAWAMSHSKHHKGTGSMTKDVVFIPATRSYKGLPALEKPAVEEEVSEQEHHHHEESIFAETPIYTLIAFIVLQTFGWPLYLIVNFSGHEAPHWVNHFQTVAPLYEPHQRKNIFYSNCGIVAMGSILTYLSMVFSPLTVFMYYGIPYLGVNAWIVCITYLQHTDPKVPHFRDNEWNFQRGAACTIDRSFGTIVNHLHHHIGDSHQCHHMFSQMPFYNAVEATKYLKAKLGKYYIFDDTPIAKALYRNWRECKFVEDEGDVVFYKH

SEQ ID NO: 781 - protein, 403 aa, Artificial sequence
  Delta-15 Desaturase
MAPPHVVDEQVRRRIVVEDEIKSKKQFERNYVPMDFTIKEIRDAIPAHLFIRDTTKSILHVVKDLVTIAIVFYCATFIETLPSLALRVPAWITYWIIQGTVMVGPWILAHECGHGAFSDSKTINTIFGWVLHSALLVPYQAWAMSHSKHHKGTGSMTKDVVFIPATRSYKGLPALEKPAVEEEVSEQEHHHHEESIFAETPIYILISFITDQTFGWPLYLIVNFSGHEAPHWVNHFQTVAPLYEPHQRKNIFYSNCGIVAMGSILTYLSMVFSPLTVFMYYGIPYLGVNAWIVCITYLQHTDPKVPHFRDNEWNFQRGAACTIDRSFGTIVNHLHHHIGDSHQCHHMFSQMPFYNAVEATKYLKAKLGKYYIFDDTPIAKALYRNWRECKFVEDEGDVVFYKH

SEQ ID NO: 782 - protein, 403 aa, Artificial sequence
  Delta-15 Desaturase
MAPPHVVDEQVRRRIVVEDEIKSKKQFERNYVPMDFTIKEIRDAIPAHLFIRDTTKSILHVVKDLVTIAIVFYCATFIETLPSLALRVPAWITYWIIQGTVMVGPWILAHECGHGAFSDSKTINTIFGWVLHSALLVPYQAWAMSHSKHHKVTGSMTKDVVFIPATRSYKGLPALEKPAVEEEVSEQEHHHHEESIFAETPIYTLGALLFVLTFGWPLYLIVNFSGHEAPHWVNHFQTVAPLYEPHQRKNIFYSNCGIVAMGSILTYLSMVFSPLTVFMYYGIPYLGVNAWIVCITYLQHTDPKVPHFRDNEWNFQRGAACTIDRSFGTIVNHLHHHIGDSHQCHHMFSQMPFYNAVEATKYLKAKLGKYYIFDDTPIAKALYRNWRECKFVEDEGDVVFYKH

SEQ ID NO: 783 - DNA, 1212 bp, Artificial sequence
  Delta-15 Desaturase
atggcccctccacacgtcgtcgacgaacaagttagaagaagaatcgttgttgaagacgagattaagtcaaagaaacaattcgagagaaactacgtcccaatggatttcactatcaaggaaatcagagacgctatccctgctcacttattcatcagagacacaactaagtcaattctacacgttgtcaaagatttggttaccattgccattgttttctactgtgctaccttcatcgaaactttgccatccttggctttgagagttccagcatggatcacctactggattattcaaggtaccgtcatggttggtccatggattttggctcacgaatgtggtcacggtgccttttctaaacccacgtggatcaacactattttcggttgggtcttgcattccgctttgttggttccttatcaggcatgggcaatgtcacactctaagcaccacaagggtactggttccatgactaaggatgttgtcttcattccagctactcgttcctacaaaggtctacctgccctagaaaagcctgctgttgaagaagaagtttctgaacaagaacatcaccaccatgaagaatccatctttgctgaaaccccaatctacactttgggtgccttgttgttcgttttaaccttcggttggccattgtacctaattgttaacttctctggtcacgaagccccacactgggtcaaccacttccaaactgttgctccattgtacgaaccacaccaaagaaagaacatcttttactctaactgtggtattgttgctatgggctctattttgacctatttgtccatggttttctctccattaactgttttcatgtactacggtatcccatacttgggtgttaatgcttggattgtttgcattacttacttacaacacactgatccaaaggttcctcacttcagagacaacgaatggaattttcaaagaggtgccgcttgtaccatcgatagatccttcggtactattgtcaaccacttgcaccaccacatcggcgattcccaccaatgtcaccacatgttctctcaaatgccattctacaatgctgtcgaagctactaagtatctaaaggccaagctaggtaagtactacatcttcgacgacactccaattgccaaggctttgtacagaaactggagagaatgtaaattcgtcgaagacgaaggtgatgttgttttctacaagcactaa

SEQ ID NO: 784 - DNA, 1212 bp, Artificial sequence
  Delta-15 Desaturase
atggcccctccacacgtcgtcgacgaacaagttagaagaagaatcgttgttgaagacgagattaagtcaaagaaacaattcgagagaaactacgtcccaatggatttcactatcaaggaaatcagagacgctatccctgctcacttattcatcagagacacaactaagtcaattctacacgttgtcaaagatttggttaccattgccattgttttctactgtgctaccttcatcgaaactttgccatccttggctttgagagttccagcatggatcacctactggattattcaaggtaccgtcatggttggtccatggattttggctcacgaatgtggtcacggtgccttttctcaacacaagtcgttcaactacattatcggttgggtcttgcattccgctttgttggttccttatcaggcatgggcaatgtcacactctaagcaccacaagggtactggttccatgactaaggatgttgtcttcattccagctactcgttcctacaaaggtctacctgccctagaaaagcctgctgttgaagaagaagtttctgaacaagaacatcaccaccatgaagaatccatctttgctgaaaccccaatctacactttgggtgccttgttgttcgttttaaccttcggttggccattgtacctaattgttaacttctctggtcacgaagccccacactgggtcaaccacttccaaactgttgctccattgtacgaaccacaccaaagaaagaacatcttttactctaactgtggtattgttgctatgggctctattttgacctatttgtccatggttttctctccattaactgttttcatgtactacggtatcccatacttgggtgttaatgcttggattgtttgcattacttacttacaacacactgatccaaaggttcctcacttcagagacaacgaatggaattttcaaagaggtgccgcttgtaccatcgatagatccttcggtactattgtcaaccacttgcaccaccacatcggcgattcccaccaatgtcaccacatgttctctcaaatgccattctacaatgctgtcgaagctactaagtatctaaaggccaagctaggtaagtactacatcttcgacgacactccaattgccaaggctttgtacagaaactggagagaatgtaaattcgtcgaagacgaaggtgatgttgttttctacaagcactaa

SEQ ID NO: 785 - DNA, 1212 bp, Artificial sequence
  Delta-15 Desaturase
atggcccctccacacgtcgtcgacgaacaagttagaagaagaatcgttgttgaagacgagattaagtcaaagaaacaattcgagagaaactacgtcccaatggatttcactatcaaggaaatcagagacgctatccctgctcacttattcatcagagacacaactaagtcaattctacacgttgtcaaagatttggttaccattgccattgttttctactgtgctaccttcatcgaaactttgccatccttggctttgagagttccagcatggatcacctactggattattcaaggtaccgtcatggttggtccatggattttggctcacgaatgtggtcacggtgccttttctcagcccaggaggatcaacaccattttcggttgggtcttgcattccgctttgttggttccttatcaggcatgggcaatgtcacactctaagcaccacaagggtactggttccatgactaaggatgttgtcttcattccagctactcgttcctacaaaggtctacctgccctagaaaagcctgctgttgaagaagaagtttctgaacaagaacatcaccaccatgaagaatccatctttgctgaaaccccaatctacactttgggtgccttgttgttcgttttaaccttcggttggccattgtacctaattgttaacttctctggtcacgaagccccacactgggtcaaccacttccaaactgttgctccattgtacgaaccacaccaaagaaagaacatcttttactctaactgtggtattgttgctatgggctctattttgacctatttgtccatggttttctctccattaactgttttcatgtactacggtatcccatacttgggtgttaatgcttggattgtttgcattacttacttacaacacactgatccaaaggttcctcacttcagagacaacgaatggaattttcaaagaggtgccgcttgtaccatcgatagatccttcggtactattgtcaaccacttgcaccaccacatcggcgattcccaccaatgtcaccacatgttctctcaaatgccattctacaatgctgtcgaagctactaagtatctaaaggccaagctaggtaagtactacatcttcgacgacactccaattgccaaggctttgtacagaaactggagagaatgtaaattcgtcgaagacgaaggtgatgttgttttctacaagcactaa

SEQ ID NO: 786 - DNA, 1212 bp, Artificial sequence
  Delta-15 Desaturase
atggcccctccacacgtcgtcgacgaacaagttagaagaagaatcgttgttgaagacgagattaagtcaaagaaacaattcgagagaaactacgtcccaatggatttcactatcaaggaaatcagagacgctatccctgctcacttattcatcagagacacaactaagtcaattctacacgttgtcaaagatttggttaccattgccattgttttctactgtgctaccttcatcgaaactttgccatccttggctttgagagttccagcatggatcacctactggattattcaaggtaccgtcatggttggtccatggattttggctcacgaatgtggtcacggtgccttttctgattccaagactatcaacactattttcggttgggtcttgcattccgctttgttggttccttatcaggcatgggcaatgtcacactctaagcaccataagtctactggtaatatgactaaggatgttgtcttcattccagctactcgttcctacaaaggtctacctgccctagaaaagcctgctgttgaagaagaagtttctgaacaagaacatcaccaccatgaagaatccatctttgctgaaaccccaatctacactttgggtgccttgttgttcgttttaaccttcggttggccattgtacctaattgttaacttctctggtcacgaagccccacactgggtcaaccacttccaaactgttgctccattgtacgaaccacaccaaagaaagaacatcttttactctaactgtggtattgttgctatgggctctattttgacctatttgtccatggttttctctccattaactgttttcatgtactacggtatcccatacttgggtgttaatgcttggattgtttgcattacttacttacaacacactgatccaaaggttcctcacttcagagacaacgaatggaattttcaaagaggtgccgcttgtaccatcgatagatccttcggtactattgtcaaccacttgcaccaccacatcggcgattcccaccaatgtcaccacatgttctctcaaatgccattctacaatgctgtcgaagctactaagtatctaaaggccaagctaggtaagtactacatcttcgacgacactccaattgccaaggctttgtacagaaactggagagaatgtaaattcgtcgaagacgaaggtgatgttgttttctacaagcactaa

SEQ ID NO: 787 - DNA, 1212 bp, Artificial sequence
  Delta-15 Desaturase
atggcccctccacacgtcgtcgacgaacaagttagaagaagaatcgttgttgaagacgagattaagtcaaagaaacaattcgagagaaactacgtcccaatggatttcactatcaaggaaatcagagacgctatccctgctcacttattcatcagagacacaactaagtcaattctacacgttgtcaaagatttggttaccattgccattgttttctactgtgctaccttcatcgaaactttgccatccttggctttgagagttccagcatggatcacctactggattattcaaggtaccgtcatggttggtccatggattttggctcacgaatgtggtcacggtgccttttctaactacacgacgttcaacaacattatcggttgggtcttgcattccgctttgttggttccttatcaggcatgggcaatgtcacactctaagcaccacaagggtactggttccatgactaaggatgttgtcttcattccagctactcgttcctacaaaggtctacctgccctagaaaagcctgctgttgaagaagaagtttctgaacaagaacatcaccaccatgaagaatccatctttgctgaaaccccaatctacactttgggtgccttgttgttcgttttaaccttcggttggccattgtacctaattgttaacttctctggtcacgaagccccacactgggtcaaccacttccaaactgttgctccattgtacgaaccacaccaaagaaagaacatcttttactctaactgtggtattgttgctatgggctctattttgacctatttgtccatggttttctctccattaactgttttcatgtactacggtatcccatacttgggtgttaatgcttggattgtttgcattacttacttacaacacactgatccaaaggttcctcacttcagagacaacgaatggaattttcaaagaggtgccgcttgtaccatcgatagatccttcggtactattgtcaaccacttgcaccaccacatcggcgattcccaccaatgtcaccacatgttctctcaaatgccattctacaatgctgtcgaagctactaagtatctaaaggccaagctaggtaagtactacatcttcgacgacactccaattgccaaggctttgtacagaaactggagagaatgtaaattcgtcgaagacgaaggtgatgttgttttctacaagcactaa

SEQ ID NO: 788 - DNA, 1212 bp, Artificial sequence
  Delta-15 Desaturase
atggcccctccacacgtcgtcgacgaacaagttagaagaagaatcgttgttgaagacgagattaagtcaaagaaacaattcgagagaaactacgtcccaatggatttcactatcaaggaaatcagagacgctatccctgctcacttattcatcagagacacaactaagtcaattctacacgttgtcaaagatttggttaccattgccattgttttctactgtgctaccttcatcgaaactttgccatccttggctttgagagttccagcatggatcacctactggattattcaaggtaccgtcatggttggtccatggattttggctcacgaatgtggtcacggtgccttttctcaatacaagtggatcaacaacattttcggttgggtcttgcattccgctttgttggttccttatcaggcatgggcaatgtcacactctaagcaccacaagggtactggttccatgactaaggatgttgtcttcattccagctactcgttcctacaaaggtctacctgccctagaaaagcctgctgttgaagaagaagtttctgaacaagaacatcaccaccatgaagaatccatctttgctgaaaccccaatctacactttgggtgccttgttgttcgttttaaccttcggttggccattgtacctaattgttaacttctctggtcacgaagccccacactgggtcaaccacttccaaactgttgctccattgtacgaaccacaccaaagaaagaacatcttttactctaactgtggtattgttgctatgggctctattttgacctatttgtccatggttttctctccattaactgttttcatgtactacggtatcccatacttgggtgttaatgcttggattgtttgcattacttacttacaacacactgatccaaaggttcctcacttcagagacaacgaatggaattttcaaagaggtgccgcttgtaccatcgatagatccttcggtactattgtcaaccacttgcaccaccacatcggcgattcccaccaatgtcaccacatgttctctcaaatgccattctacaatgctgtcgaagctactaagtatctaaaggccaagctaggtaagtactacatcttcgacgacactccaattgccaaggctttgtacagaaactggagagaatgtaaattcgtcgaagacgaaggtgatgttgttttctacaagcactaa

SEQ ID NO: 789 - DNA, 1212 bp, Artificial sequence
  Delta-15 Desaturase
atggcccctccacacgtcgtcgacgaacaagttagaagaagaatcgttgttgaagacgagattaagtcaaagaaacaattcgagagaaactacgtcccaatggatttcactatcaaggaaatcagagacgctatccctgctcacttattcatcagagacacaactaagtcaattctacacgttgtcaaagatttggttaccattgccattgttttctactgtgctaccttcatcgaaactttgccatccttggctttgagagttccagcatggatcacctactggattattcaaggtaccgtcatggttggtccatggattttggctcacgaatgtggtcacggtgccttttctgaatccaggtggttcaacaccattatcggttgggtcttgcattccgctttgttggttccttatcaggcatgggcaatgtcacactctaagcaccacaagggtactggttccatgactaaggatgttgtcttcattccagctactcgttcctacaaaggtctacctgccctagaaaagcctgctgttgaagaagaagtttctgaacaagaacatcaccaccatgaagaatccatctttgctgaaaccccaatctacactttgggtgccttgttgttcgttttaaccttcggttggccattgtacctaattgttaacttctctggtcacgaagccccacactgggtcaaccacttccaaactgttgctccattgtacgaaccacaccaaagaaagaacatcttttactctaactgtggtattgttgctatgggctctattttgacctatttgtccatggttttctctccattaactgttttcatgtactacggtatcccatacttgggtgttaatgcttggattgtttgcattacttacttacaacacactgatccaaaggttcctcacttcagagacaacgaatggaattttcaaagaggtgccgcttgtaccatcgatagatccttcggtactattgtcaaccacttgcaccaccacatcggcgattcccaccaatgtcaccacatgttctctcaaatgccattctacaatgctgtcgaagctactaagtatctaaaggccaagctaggtaagtactacatcttcgacgacactccaattgccaaggctttgtacagaaactggagagaatgtaaattcgtcgaagacgaaggtgatgttgttttctacaagcactaa

SEQ ID NO: 790 - DNA, 1212 bp, Artificial sequence
  Delta-15 Desaturase
atggcccctccacacgtcgtcgacgaacaagttagaagaagaatcgttgttgaagacgagattaagtcaaagaaacaattcgagagaaactacgtcccaatggatttcactatcaaggaaatcagagacgctatccctgctcacttattcatcagagacacaactaagtcaattctacacgttgtcaaagatttggttaccattgccattgttttctactgtgctaccttcatcgaaactttgccatccttggctttgagagttccagcatggatcacctactggattattcaaggtaccgtcatggttggtccatggattttggctcacgaatgtggtcacggtgccttttctaagcacacgtcgttcaactccattatcggttgggtcttgcattccgctttgttggttccttatcaggcatgggcaatgtcacactctaagcaccacaagggtactggttccatgactaaggatgttgtcttcattccagctactcgttcctacaaaggtctacctgccctagaaaagcctgctgttgaagaagaagtttctgaacaagaacatcaccaccatgaagaatccatctttgctgaaaccccaatctacactttgggtgccttgttgttcgttttaaccttcggttggccattgtacctaattgttaacttctctggtcacgaagccccacactgggtcaaccacttccaaactgttgctccattgtacgaaccacaccaaagaaagaacatcttttactctaactgtggtattgttgctatgggctctattttgacctatttgtccatggttttctctccattaactgttttcatgtactacggtatcccatacttgggtgttaatgcttggattgtttgcattacttacttacaacacactgatccaaaggttcctcacttcagagacaacgaatggaattttcaaagaggtgccgcttgtaccatcgatagatccttcggtactattgtcaaccacttgcaccaccacatcggcgattcccaccaatgtcaccacatgttctctcaaatgccattctacaatgctgtcgaagctactaagtatctaaaggccaagctaggtaagtactacatcttcgacgacactccaattgccaaggctttgtacagaaactggagagaatgtaaattcgtcgaagacgaaggtgatgttgttttctacaagcactaa

SEQ ID NO: 791 - DNA, 1212 bp, Artificial sequence
  Delta-15 Desaturase
atggcccctccacacgtcgtcgacgaacaagttagaagaagaatcgttgttgaagacgagattaagtcaaagaaacaattcgagagaaactacgtcccaatggatttcactatcaaggaaatcagagacgctatccctgctcacttattcatcagagacacaactaagtcaattctacacgttgtcaaagatttggttaccattgccattgttttctactgtgctaccttcatcgaaactttgccatccttggctttgagagttccagcatggatcacctactggattattcaaggtaccgtcatggttggtccatggattttggctcacgaatgtggtcacggtgccttttctcaacacacgacgttcaacaccattatcggttgggtcttgcattccgctttgttggttccttatcaggcatgggcaatgtcacactctaagcaccacaagggtactggttccatgactaaggatgttgtcttcattccagctactcgttcctacaaaggtctacctgccctagaaaagcctgctgttgaagaagaagtttctgaacaagaacatcaccaccatgaagaatccatctttgctgaaaccccaatctacactttgggtgccttgttgttcgttttaaccttcggttggccattgtacctaattgttaacttctctggtcacgaagccccacactgggtcaaccacttccaaactgttgctccattgtacgaaccacaccaaagaaagaacatcttttactctaactgtggtattgttgctatgggctctattttgacctatttgtccatggttttctctccattaactgttttcatgtactacggtatcccatacttgggtgttaatgcttggattgtttgcattacttacttacaacacactgatccaaaggttcctcacttcagagacaacgaatggaattttcaaagaggtgccgcttgtaccatcgatagatccttcggtactattgtcaaccacttgcaccaccacatcggcgattcccaccaatgtcaccacatgttctctcaaatgccattctacaatgctgtcgaagctactaagtatctaaaggccaagctaggtaagtactacatcttcgacgacactccaattgccaaggctttgtacagaaactggagagaatgtaaattcgtcgaagacgaaggtgatgttgttttctacaagcactaa

SEQ ID NO: 792 - DNA, 1212 bp, Artificial sequence
  Delta-15 Desaturase
atggcccctccacacgtcgtcgacgaacaagttagaagaagaatcgttgttgaagacgagattaagtcaaagaaacaattcgagagaaactacgtcccaatggatttcactatcaaggaaatcagagacgctatccctgctcacttattcatcagagacacaactaagtcaattctacacgttgtcaaagatttggttaccattgccattgttttctactgtgctaccttcatcgaaactttgccatccttggctttgagagttccagcatggatcacctactggattattcaaggtaccgtcatggttggtccatggattttggctcacgaatgtggtcacggtgccttttctcaacacacgtggttcaactccattatcggttgggtcttgcattccgctttgttggttccttatcaggcatgggcaatgtcacactctaagcaccacaagggtactggttccatgactaaggatgttgtcttcattccagctactcgttcctacaaaggtctacctgccctagaaaagcctgctgttgaagaagaagtttctgaacaagaacatcaccaccatgaagaatccatctttgctgaaaccccaatctacactttgggtgccttgttgttcgttttaaccttcggttggccattgtacctaattgttaacttctctggtcacgaagccccacactgggtcaaccacttccaaactgttgctccattgtacgaaccacaccaaagaaagaacatcttttactctaactgtggtattgttgctatgggctctattttgacctatttgtccatggttttctctccattaactgttttcatgtactacggtatcccatacttgggtgttaatgcttggattgtttgcattacttacttacaacacactgatccaaaggttcctcacttcagagacaacgaatggaattttcaaagaggtgccgcttgtaccatcgatagatccttcggtactattgtcaaccacttgcaccaccacatcggcgattcccaccaatgtcaccacatgttctctcaaatgccattctacaatgctgtcgaagctactaagtatctaaaggccaagctaggtaagtactacatcttcgacgacactccaattgccaaggctttgtacagaaactggagagaatgtaaattcgtcgaagacgaaggtgatgttgttttctacaagcactaa

SEQ ID NO: 793 - DNA, 1212 bp, Artificial sequence
  Delta-15 Desaturase
atggcccctccacacgtcgtcgacgaacaagttagaagaagaatcgttgttgaagacgagattaagtcaaagaaacaattcgagagaaactacgtcccaatggatttcactatcaaggaaatcagagacgctatccctgctcacttattcatcagagacacaactaagtcaattctacacgttgtcaaagatttggttaccattgccattgttttctactgtgctaccttcatcgaaactttgccatccttggctttgagagttccagcatggatcacctactggattattcaaggtaccgtcatggttggtccatggattttggctcacgaatgtggtcacggtgccttttctaattccaagtggttcaacaccattatcggttgggtcttgcattccgctttgttggttccttatcaggcatgggcaatgtcacactctaagcaccacaagggtactggttccatgactaaggatgttgtcttcattccagctactcgttcctacaaaggtctacctgccctagaaaagcctgctgttgaagaagaagtttctgaacaagaacatcaccaccatgaagaatccatctttgctgaaaccccaatctacactttgggtgccttgttgttcgttttaaccttcggttggccattgtacctaattgttaacttctctggtcacgaagccccacactgggtcaaccacttccaaactgttgctccattgtacgaaccacaccaaagaaagaacatcttttactctaactgtggtattgttgctatgggctctattttgacctatttgtccatggttttctctccattaactgttttcatgtactacggtatcccatacttgggtgttaatgcttggattgtttgcattacttacttacaacacactgatccaaaggttcctcacttcagagacaacgaatggaattttcaaagaggtgccgcttgtaccatcgatagatccttcggtactattgtcaaccacttgcaccaccacatcggcgattcccaccaatgtcaccacatgttctctcaaatgccattctacaatgctgtcgaagctactaagtatctaaaggccaagctaggtaagtactacatcttcgacgacactccaattgccaaggctttgtacagaaactggagagaatgtaaattcgtcgaagacgaaggtgatgttgttttctacaagcactaa

SEQ ID NO: 794 - DNA, 1212 bp, Artificial sequence
  Delta-15 Desaturase
atggcccctccacacgtcgtcgacgaacaagttagaagaagaatcgttgttgaagacgagattaagtcaaagaaacaattcgagagaaactacgtcccaatggatttcactatcaaggaaatcagagacgctatccctgctcacttattcatcagagacacaactaagtcaattctacacgttgtcaaagatttggttaccattgccattgttttctactgtgctaccttcatcgaaactttgccatccttggctttgagagttccagcatggatcacctactggattattcaaggtaccgtcatggttggtccatggattttggctcacgaatgtggtcacggtgccttttctaaccacaagtcgttcaacaccattttcggttgggtcttgcattccgctttgttggttccttatcaggcatgggcaatgtcacactctaagcaccacaagggtactggttccatgactaaggatgttgtcttcattccagctactcgttcctacaaaggtctacctgccctagaaaagcctgctgttgaagaagaagtttctgaacaagaacatcaccaccatgaagaatccatctttgctgaaaccccaatctacactttgggtgccttgttgttcgttttaaccttcggttggccattgtacctaattgttaacttctctggtcacgaagccccacactgggtcaaccacttccaaactgttgctccattgtacgaaccacaccaaagaaagaacatcttttactctaactgtggtattgttgctatgggctctattttgacctatttgtccatggttttctctccattaactgttttcatgtactacggtatcccatacttgggtgttaatgcttggattgtttgcattacttacttacaacacactgatccaaaggttcctcacttcagagacaacgaatggaattttcaaagaggtgccgcttgtaccatcgatagatccttcggtactattgtcaaccacttgcaccaccacatcggcgattcccaccaatgtcaccacatgttctctcaaatgccattctacaatgctgtcgaagctactaagtatctaaaggccaagctaggtaagtactacatcttcgacgacactccaattgccaaggctttgtacagaaactggagagaatgtaaattcgtcgaagacgaaggtgatgttgttttctacaagcactaa

SEQ ID NO: 795 - DNA, 1212 bp, Artificial sequence
  Delta-15 Desaturase
atggcccctccacacgtcgtcgacgaacaagttagaagaagaatcgttgttgaagacgagattaagtcaaagaaacaattcgagagaaactacgtcccaatggatttcactatcaaggaaatcagagacgctatccctgctcacttattcatcagagacacaactaagtcaattctacacgttgtcaaagatttggttaccattgccattgttttctactgtgctaccttcatcgaaactttgccatccttggctttgagagttccagcatggatcacctactggattattcaaggtaccgtcatggttggtccatggattttggctcacgaatgtggtcacggtgccttttctaaacccacgaggatcaacaacattatgggttgggtcttgcattccgctttgttggttccttatcaggcatgggcaatgtcacactctaagcaccacaagggtactggttccatgactaaggatgttgtcttcattccagctactcgttcctacaaaggtctacctgccctagaaaagcctgctgttgaagaagaagtttctgaacaagaacatcaccaccatgaagaatccatctttgctgaaaccccaatctacactttgggtgccttgttgttcgttttaaccttcggttggccattgtacctaattgttaacttctctggtcacgaagccccacactgggtcaaccacttccaaactgttgctccattgtacgaaccacaccaaagaaagaacatcttttactctaactgtggtattgttgctatgggctctattttgacctatttgtccatggttttctctccattaactgttttcatgtactacggtatcccatacttgggtgttaatgcttggattgtttgcattacttacttacaacacactgatccaaaggttcctcacttcagagacaacgaatggaattttcaaagaggtgccgcttgtaccatcgatagatccttcggtactattgtcaaccacttgcaccaccacatcggcgattcccaccaatgtcaccacatgttctctcaaatgccattctacaatgctgtcgaagctactaagtatctaaaggccaagctaggtaagtactacatcttcgacgacactccaattgccaaggctttgtacagaaactggagagaatgtaaattcgtcgaagacgaaggtgatgttgttttctacaagcactaa

SEQ ID NO: 796 - DNA, 1212 bp, Artificial sequence
  Delta-15 Desaturase
atggcccctccacacgtcgtcgacgaacaagttagaagaagaatcgttgttgaagacgagattaagtcaaagaaacaattcgagagaaactacgtcccaatggatttcactatcaaggaaatcagagacgctatccctgctcacttattcatcagagacacaactaagtcaattctacacgttgtcaaagatttggttaccattgccattgttttctactgtgctaccttcatcgaaactttgccatccttggctttgagagttccagcatggatcacctactggattattcaaggtaccgtcatggttggtccatggattttggctcacgaatgtggtcacggtgccttttctaattccaggacgatcaacaccattttgggttgggtcttgcattccgctttgttggttccttatcaggcatgggcaatgtcacactctaagcaccacaagggtactggttccatgactaaggatgttgtcttcattccagctactcgttcctacaaaggtctacctgccctagaaaagcctgctgttgaagaagaagtttctgaacaagaacatcaccaccatgaagaatccatctttgctgaaaccccaatctacactttgggtgccttgttgttcgttttaaccttcggttggccattgtacctaattgttaacttctctggtcacgaagccccacactgggtcaaccacttccaaactgttgctccattgtacgaaccacaccaaagaaagaacatcttttactctaactgtggtattgttgctatgggctctattttgacctatttgtccatggttttctctccattaactgttttcatgtactacggtatcccatacttgggtgttaatgcttggattgtttgcattacttacttacaacacactgatccaaaggttcctcacttcagagacaacgaatggaattttcaaagaggtgccgcttgtaccatcgatagatccttcggtactattgtcaaccacttgcaccaccacatcggcgattcccaccaatgtcaccacatgttctctcaaatgccattctacaatgctgtcgaagctactaagtatctaaaggccaagctaggtaagtactacatcttcgacgacactccaattgccaaggctttgtacagaaactggagagaatgtaaattcgtcgaagacgaaggtgatgttgttttctacaagcactaa

SEQ ID NO: 797 - DNA, 1212 bp, Artificial sequence
  Delta-15 Desaturase
atggcccctccacacgtcgtcgacgaacaagttagaagaagaatcgttgttgaagacgagattaagtcaaagaaacaattcgagagaaactacgtcccaatggatttcactatcaaggaaatcagagacgctatccctgctcacttattcatcagagacacaactaagtcaattctacacgttgtcaaagatttggttaccattgccattgttttctactgtgctaccttcatcgaaactttgccatccttggctttgagagttccagcatggatcacctactggattattcaaggtaccgtcatggttggtccatggattttggctcacgaatgtggtcacggtgccttttctaatcacaggtggatcaacaccattatcggttgggtcttgcattccgctttgttggttccttatcaggcatgggcaatgtcacactctaagcaccacaagggtactggttccatgactaaggatgttgtcttcattccagctactcgttcctacaaaggtctacctgccctagaaaagcctgctgttgaagaagaagtttctgaacaagaacatcaccaccatgaagaatccatctttgctgaaaccccaatctacactttgggtgccttgttgttcgttttaaccttcggttggccattgtacctaattgttaacttctctggtcacgaagccccacactgggtcaaccacttccaaactgttgctccattgtacgaaccacaccaaagaaagaacatcttttactctaactgtggtattgttgctatgggctctattttgacctatttgtccatggttttctctccattaactgttttcatgtactacggtatcccatacttgggtgttaatgcttggattgtttgcattacttacttacaacacactgatccaaaggttcctcacttcagagacaacgaatggaattttcaaagaggtgccgcttgtaccatcgatagatccttcggtactattgtcaaccacttgcaccaccacatcggcgattcccaccaatgtcaccacatgttctctcaaatgccattctacaatgctgtcgaagctactaagtatctaaaggccaagctaggtaagtactacatcttcgacgacactccaattgccaaggctttgtacagaaactggagagaatgtaaattcgtcgaagacgaaggtgatgttgttttctacaagcactaa

SEQ ID NO: 798 - DNA, 1212 bp, Artificial sequence
  Delta-15 Desaturase
atggcccctccacacgtcgtcgacgaacaagttagaagaagaatcgttgttgaagacgagattaagtcaaagaaacaattcgagagaaactacgtcccaatggatttcactatcaaggaaatcagagacgctatccctgctcacttattcatcagagacacaactaagtcaattctacacgttgtcaaagatttggttaccattgccattgttttctactgtgctaccttcatcgaaactttgccatccttggctttgagagttccagcatggatcacctactggattattcaaggtaccgtcatggttggtccatggattttggctcacgaatgtggtcacggtgccttttctgaatccaagtggatcaactccattttcggttgggtcttgcattccgctttgttggttccttatcaggcatgggcaatgtcacactctaagcaccacaagggtactggttccatgactaaggatgttgtcttcattccagctactcgttcctacaaaggtctacctgccctagaaaagcctgctgttgaagaagaagtttctgaacaagaacatcaccaccatgaagaatccatctttgctgaaaccccaatctacactttgggtgccttgttgttcgttttaaccttcggttggccattgtacctaattgttaacttctctggtcacgaagccccacactgggtcaaccacttccaaactgttgctccattgtacgaaccacaccaaagaaagaacatcttttactctaactgtggtattgttgctatgggctctattttgacctatttgtccatggttttctctccattaactgttttcatgtactacggtatcccatacttgggtgttaatgcttggattgtttgcattacttacttacaacacactgatccaaaggttcctcacttcagagacaacgaatggaattttcaaagaggtgccgcttgtaccatcgatagatccttcggtactattgtcaaccacttgcaccaccacatcggcgattcccaccaatgtcaccacatgttctctcaaatgccattctacaatgctgtcgaagctactaagtatctaaaggccaagctaggtaagtactacatcttcgacgacactccaattgccaaggctttgtacagaaactggagagaatgtaaattcgtcgaagacgaaggtgatgttgttttctacaagcactaa

SEQ ID NO: 799 - DNA, 1212 bp, Artificial sequence
  Delta-15 Desaturase
atggcccctccacacgtcgtcgacgaacaagttagaagaagaatcgttgttgaagacgagattaagtcaaagaaacaattcgagagaaactacgtcccaatggatttcactatcaaggaaatcagagacgctatccctgctcacttattcatcagagacacaactaagtcaattctacacgttgtcaaagatttggttaccattgccattgttttctactgtgctaccttcatcgaaactttgccatccttggctttgagagttccagcatggatcacctactggattattcaaggtaccgtcatggttggtccatggattttggctcacgaatgtggtcacggtgccttttctaactacacgtggttcaactacattttcggttgggtcttgcattccgctttgttggttccttatcaggcatgggcaatgtcacactctaagcaccacaagggtactggttccatgactaaggatgttgtcttcattccagctactcgttcctacaaaggtctacctgccctagaaaagcctgctgttgaagaagaagtttctgaacaagaacatcaccaccatgaagaatccatctttgctgaaaccccaatctacactttgggtgccttgttgttcgttttaaccttcggttggccattgtacctaattgttaacttctctggtcacgaagccccacactgggtcaaccacttccaaactgttgctccattgtacgaaccacaccaaagaaagaacatcttttactctaactgtggtattgttgctatgggctctattttgacctatttgtccatggttttctctccattaactgttttcatgtactacggtatcccatacttgggtgttaatgcttggattgtttgcattacttacttacaacacactgatccaaaggttcctcacttcagagacaacgaatggaattttcaaagaggtgccgcttgtaccatcgatagatccttcggtactattgtcaaccacttgcaccaccacatcggcgattcccaccaatgtcaccacatgttctctcaaatgccattctacaatgctgtcgaagctactaagtatctaaaggccaagctaggtaagtactacatcttcgacgacactccaattgccaaggctttgtacagaaactggagagaatgtaaattcgtcgaagacgaaggtgatgttgttttctacaagcactaa

SEQ ID NO: 800 - DNA, 1212 bp, Artificial sequence
  Delta-15 Desaturase
atggcccctccacacgtcgtcgacgaacaagttagaagaagaatcgttgttgaagacgagattaagtcaaagaaacaattcgagagaaactacgtcccaatggatttcactatcaaggaaatcagagacgctatccctgctcacttattcatcagagacacaactaagtcaattctacacgttgtcaaagatttggttaccattgccattgttttctactgtgctaccttcatcgaaactttgccatccttggctttgagagttccagcatggatcacctactggattattcaaggtaccgtcatggttggtccatggattttggctcacgaatgtggtcacggtgccttttctaaatacaagtcgttcaactccattttcggttgggtcttgcattccgctttgttggttccttatcaggcatgggcaatgtcacactctaagcaccacaagggtactggttccatgactaaggatgttgtcttcattccagctactcgttcctacaaaggtctacctgccctagaaaagcctgctgttgaagaagaagtttctgaacaagaacatcaccaccatgaagaatccatctttgctgaaaccccaatctacactttgggtgccttgttgttcgttttaaccttcggttggccattgtacctaattgttaacttctctggtcacgaagccccacactgggtcaaccacttccaaactgttgctccattgtacgaaccacaccaaagaaagaacatcttttactctaactgtggtattgttgctatgggctctattttgacctatttgtccatggttttctctccattaactgttttcatgtactacggtatcccatacttgggtgttaatgcttggattgtttgcattacttacttacaacacactgatccaaaggttcctcacttcagagacaacgaatggaattttcaaagaggtgccgcttgtaccatcgatagatccttcggtactattgtcaaccacttgcaccaccacatcggcgattcccaccaatgtcaccacatgttctctcaaatgccattctacaatgctgtcgaagctactaagtatctaaaggccaagctaggtaagtactacatcttcgacgacactccaattgccaaggctttgtacagaaactggagagaatgtaaattcgtcgaagacgaaggtgatgttgttttctacaagcactaa

SEQ ID NO: 801 - DNA, 1212 bp, Artificial sequence
  Delta-15 Desaturase
atggcccctccacacgtcgtcgacgaacaagttagaagaagaatcgttgttgaagacgagattaagtcaaagaaacaattcgagagaaactacgtcccaatggatttcactatcaaggaaatcagagacgctatccctgctcacttattcatcagagacacaactaagtcaattctacacgttgtcaaagatttggttaccattgccattgttttctactgtgctaccttcatcgaaactttgccatccttggctttgagagttccagcatggatcacctactggattattcaaggtaccgtcatggttggtccatggattttggctcacgaatgtggtcacggtgccttttctaattacaagtcgatcaactccattttgggttgggtcttgcattccgctttgttggttccttatcaggcatgggcaatgtcacactctaagcaccacaagggtactggttccatgactaaggatgttgtcttcattccagctactcgttcctacaaaggtctacctgccctagaaaagcctgctgttgaagaagaagtttctgaacaagaacatcaccaccatgaagaatccatctttgctgaaaccccaatctacactttgggtgccttgttgttcgttttaaccttcggttggccattgtacctaattgttaacttctctggtcacgaagccccacactgggtcaaccacttccaaactgttgctccattgtacgaaccacaccaaagaaagaacatcttttactctaactgtggtattgttgctatgggctctattttgacctatttgtccatggttttctctccattaactgttttcatgtactacggtatcccatacttgggtgttaatgcttggattgtttgcattacttacttacaacacactgatccaaaggttcctcacttcagagacaacgaatggaattttcaaagaggtgccgcttgtaccatcgatagatccttcggtactattgtcaaccacttgcaccaccacatcggcgattcccaccaatgtcaccacatgttctctcaaatgccattctacaatgctgtcgaagctactaagtatctaaaggccaagctaggtaagtactacatcttcgacgacactccaattgccaaggctttgtacagaaactggagagaatgtaaattcgtcgaagacgaaggtgatgttgttttctacaagcactaa

SEQ ID NO: 802 - DNA, 1212 bp, Artificial sequence
  Delta-15 Desaturase
atggcccctccacacgtcgtcgacgaacaagttagaagaagaatcgttgttgaagacgagattaagtcaaagaaacaattcgagagaaactacgtcccaatggatttcactatcaaggaaatcagagacgctatccctgctcacttattcatcagagacacaactaagtcaattctacacgttgtcaaagatttggttaccattgccattgttttctactgtgctaccttcatcgaaactttgccatccttggctttgagagttccagcatggatcacctactggattattcaaggtaccgtcatggttggtccatggattttggctcacgaatgtggtcacggtgccttttctaaatacaggacgttcaactacattttcggttgggtcttgcattccgctttgttggttccttatcaggcatgggcaatgtcacactctaagcaccacaagggtactggttccatgactaaggatgttgtcttcattccagctactcgttcctacaaaggtctacctgccctagaaaagcctgctgttgaagaagaagtttctgaacaagaacatcaccaccatgaagaatccatctttgctgaaaccccaatctacactttgggtgccttgttgttcgttttaaccttcggttggccattgtacctaattgttaacttctctggtcacgaagccccacactgggtcaaccacttccaaactgttgctccattgtacgaaccacaccaaagaaagaacatcttttactctaactgtggtattgttgctatgggctctattttgacctatttgtccatggttttctctccattaactgttttcatgtactacggtatcccatacttgggtgttaatgcttggattgtttgcattacttacttacaacacactgatccaaaggttcctcacttcagagacaacgaatggaattttcaaagaggtgccgcttgtaccatcgatagatccttcggtactattgtcaaccacttgcaccaccacatcggcgattcccaccaatgtcaccacatgttctctcaaatgccattctacaatgctgtcgaagctactaagtatctaaaggccaagctaggtaagtactacatcttcgacgacactccaattgccaaggctttgtacagaaactggagagaatgtaaattcgtcgaagacgaaggtgatgttgttttctacaagcactaa

SEQ ID NO: 803 - DNA, 1212 bp, Artificial sequence
  Delta-15 Desaturase
atggcccctccacacgtcgtcgacgaacaagttagaagaagaatcgttgttgaagacgagattaagtcaaagaaacaattcgagagaaactacgtcccaatggatttcactatcaaggaaatcagagacgctatccctgctcacttattcatcagagacacaactaagtcaattctacacgttgtcaaagatttggttaccattgccattgttttctactgtgctaccttcatcgaaactttgccatccttggctttgagagttccagcatggatcacctactggattattcaaggtaccgtcatggttggtccatggattttggctcacgaatgtggtcacggtgccttttctaactacaagtcgttcaactccattatcggttgggtcttgcattccgctttgttggttccttatcaggcatgggcaatgtcacactctaagcaccacaagggtactggttccatgactaaggatgttgtcttcattccagctactcgttcctacaaaggtctacctgccctagaaaagcctgctgttgaagaagaagtttctgaacaagaacatcaccaccatgaagaatccatctttgctgaaaccccaatctacactttgggtgccttgttgttcgttttaaccttcggttggccattgtacctaattgttaacttctctggtcacgaagccccacactgggtcaaccacttccaaactgttgctccattgtacgaaccacaccaaagaaagaacatcttttactctaactgtggtattgttgctatgggctctattttgacctatttgtccatggttttctctccattaactgttttcatgtactacggtatcccatacttgggtgttaatgcttggattgtttgcattacttacttacaacacactgatccaaaggttcctcacttcagagacaacgaatggaattttcaaagaggtgccgcttgtaccatcgatagatccttcggtactattgtcaaccacttgcaccaccacatcggcgattcccaccaatgtcaccacatgttctctcaaatgccattctacaatgctgtcgaagctactaagtatctaaaggccaagctaggtaagtactacatcttcgacgacactccaattgccaaggctttgtacagaaactggagagaatgtaaattcgtcgaagacgaaggtgatgttgttttctacaagcactaa

SEQ ID NO: 804 - DNA, 1212 bp, Artificial sequence
  Delta-15 Desaturase
atggcccctccacacgtcgtcgacgaacaagttagaagaagaatcgttgttgaagacgagattaagtcaaagaaacaattcgagagaaactacgtcccaatggatttcactatcaaggaaatcagagacgctatccctgctcacttattcatcagagacacaactaagtcaattctacacgttgtcaaagatttggttaccattgccattgttttctactgtgctaccttcatcgaaactttgccatccttggctttgagagttccagcatggatcacctactggattattcaaggtaccgtcatggttggtccatggattttggctcacgaatgtggtcacggtgccttttctaaccacaggtcgttcaactccattatcggttgggtcttgcattccgctttgttggttccttatcaggcatgggcaatgtcacactctaagcaccacaagggtactggttccatgactaaggatgttgtcttcattccagctactcgttcctacaaaggtctacctgccctagaaaagcctgctgttgaagaagaagtttctgaacaagaacatcaccaccatgaagaatccatctttgctgaaaccccaatctacactttgggtgccttgttgttcgttttaaccttcggttggccattgtacctaattgttaacttctctggtcacgaagccccacactgggtcaaccacttccaaactgttgctccattgtacgaaccacaccaaagaaagaacatcttttactctaactgtggtattgttgctatgggctctattttgacctatttgtccatggttttctctccattaactgttttcatgtactacggtatcccatacttgggtgttaatgcttggattgtttgcattacttacttacaacacactgatccaaaggttcctcacttcagagacaacgaatggaattttcaaagaggtgccgcttgtaccatcgatagatccttcggtactattgtcaaccacttgcaccaccacatcggcgattcccaccaatgtcaccacatgttctctcaaatgccattctacaatgctgtcgaagctactaagtatctaaaggccaagctaggtaagtactacatcttcgacgacactccaattgccaaggctttgtacagaaactggagagaatgtaaattcgtcgaagacgaaggtgatgttgttttctacaagcactaa

SEQ ID NO: 805 - DNA, 1212 bp, Artificial sequence
  Delta-15 Desaturase
atggcccctccacacgtcgtcgacgaacaagttagaagaagaatcgttgttgaagacgagattaagtcaaagaaacaattcgagagaaactacgtcccaatggatttcactatcaaggaaatcagagacgctatccctgctcacttattcatcagagacacaactaagtcaattctacacgttgtcaaagatttggttaccattgccattgttttctactgtgctaccttcatcgaaactttgccatccttggctttgagagttccagcatggatcacctactggattattcaaggtaccgtcatggttggtccatggattttggctcacgaatgtggtcacggtgccttttctgatcacaagtggttcaacaccattatgggttgggtcttgcattccgctttgttggttccttatcaggcatgggcaatgtcacactctaagcaccacaagggtactggttccatgactaaggatgttgtcttcattccagctactcgttcctacaaaggtctacctgccctagaaaagcctgctgttgaagaagaagtttctgaacaagaacatcaccaccatgaagaatccatctttgctgaaaccccaatctacactttgggtgccttgttgttcgttttaaccttcggttggccattgtacctaattgttaacttctctggtcacgaagccccacactgggtcaaccacttccaaactgttgctccattgtacgaaccacaccaaagaaagaacatcttttactctaactgtggtattgttgctatgggctctattttgacctatttgtccatggttttctctccattaactgttttcatgtactacggtatcccatacttgggtgttaatgcttggattgtttgcattacttacttacaacacactgatccaaaggttcctcacttcagagacaacgaatggaattttcaaagaggtgccgcttgtaccatcgatagatccttcggtactattgtcaaccacttgcaccaccacatcggcgattcccaccaatgtcaccacatgttctctcaaatgccattctacaatgctgtcgaagctactaagtatctaaaggccaagctaggtaagtactacatcttcgacgacactccaattgccaaggctttgtacagaaactggagagaatgtaaattcgtcgaagacgaaggtgatgttgttttctacaagcactaa

SEQ ID NO: 806 - DNA, 1212 bp, Artificial sequence
  Delta-15 Desaturase
atggcccctccacacgtcgtcgacgaacaagttagaagaagaatcgttgttgaagacgagattaagtcaaagaaacaattcgagagaaactacgtcccaatggatttcactatcaaggaaatcagagacgctatccctgctcacttattcatcagagacacaactaagtcaattctacacgttgtcaaagatttggttaccattgccattgttttctactgtgctaccttcatcgaaactttgccatccttggctttgagagttccagcatggatcacctactggattattcaaggtaccgtcatggttggtccatggattttggctcacgaatgtggtcacggtgccttttctcaacacaagtcgatcaactacattttcggttgggtcttgcattccgctttgttggttccttatcaggcatgggcaatgtcacactctaagcaccacaagggtactggttccatgactaaggatgttgtcttcattccagctactcgttcctacaaaggtctacctgccctagaaaagcctgctgttgaagaagaagtttctgaacaagaacatcaccaccatgaagaatccatctttgctgaaaccccaatctacactttgggtgccttgttgttcgttttaaccttcggttggccattgtacctaattgttaacttctctggtcacgaagccccacactgggtcaaccacttccaaactgttgctccattgtacgaaccacaccaaagaaagaacatcttttactctaactgtggtattgttgctatgggctctattttgacctatttgtccatggttttctctccattaactgttttcatgtactacggtatcccatacttgggtgttaatgcttggattgtttgcattacttacttacaacacactgatccaaaggttcctcacttcagagacaacgaatggaattttcaaagaggtgccgcttgtaccatcgatagatccttcggtactattgtcaaccacttgcaccaccacatcggcgattcccaccaatgtcaccacatgttctctcaaatgccattctacaatgctgtcgaagctactaagtatctaaaggccaagctaggtaagtactacatcttcgacgacactccaattgccaaggctttgtacagaaactggagagaatgtaaattcgtcgaagacgaaggtgatgttgttttctacaagcactaa

SEQ ID NO: 807 - DNA, 1212 bp, Artificial sequence
  Delta-15 Desaturase
atggcccctccacacgtcgtcgacgaacaagttagaagaagaatcgttgttgaagacgagattaagtcaaagaaacaattcgagagaaactacgtcccaatggatttcactatcaaggaaatcagagacgctatccctgctcacttattcatcagagacacaactaagtcaattctacacgttgtcaaagatttggttaccattgccattgttttctactgtgctaccttcatcgaaactttgccatccttggctttgagagttccagcatggatcacctactggattattcaaggtaccgtcatggttggtccatggattttggctcacgaatgtggtcacggtgccttttctgaacccaagtggatcaacaacattatcggttgggtcttgcattccgctttgttggttccttatcaggcatgggcaatgtcacactctaagcaccacaagggtactggttccatgactaaggatgttgtcttcattccagctactcgttcctacaaaggtctacctgccctagaaaagcctgctgttgaagaagaagtttctgaacaagaacatcaccaccatgaagaatccatctttgctgaaaccccaatctacactttgggtgccttgttgttcgttttaaccttcggttggccattgtacctaattgttaacttctctggtcacgaagccccacactgggtcaaccacttccaaactgttgctccattgtacgaaccacaccaaagaaagaacatcttttactctaactgtggtattgttgctatgggctctattttgacctatttgtccatggttttctctccattaactgttttcatgtactacggtatcccatacttgggtgttaatgcttggattgtttgcattacttacttacaacacactgatccaaaggttcctcacttcagagacaacgaatggaattttcaaagaggtgccgcttgtaccatcgatagatccttcggtactattgtcaaccacttgcaccaccacatcggcgattcccaccaatgtcaccacatgttctctcaaatgccattctacaatgctgtcgaagctactaagtatctaaaggccaagctaggtaagtactacatcttcgacgacactccaattgccaaggctttgtacagaaactggagagaatgtaaattcgtcgaagacgaaggtgatgttgttttctacaagcactaa

SEQ ID NO: 808 - DNA, 1212 bp, Artificial sequence
  Delta-15 Desaturase
atggcccctccacacgtcgtcgacgaacaagttagaagaagaatcgttgttgaagacgagattaagtcaaagaaacaattcgagagaaactacgtcccaatggatttcactatcaaggaaatcagagacgctatccctgctcacttattcatcagagacacaactaagtcaattctacacgttgtcaaagatttggttaccattgccattgttttctactgtgctaccttcatcgaaactttgccatccttggctttgagagttccagcatggatcacctactggattattcaaggtaccgtcatggttggtccatggattttggctcacgaatgtggtcacggtgccttttctgaacccaagtcgatcaactacattttcggttgggtcttgcattccgctttgttggttccttatcaggcatgggcaatgtcacactctaagcaccacaagggtactggttccatgactaaggatgttgtcttcattccagctactcgttcctacaaaggtctacctgccctagaaaagcctgctgttgaagaagaagtttctgaacaagaacatcaccaccatgaagaatccatctttgctgaaaccccaatctacactttgggtgccttgttgttcgttttaaccttcggttggccattgtacctaattgttaacttctctggtcacgaagccccacactgggtcaaccacttccaaactgttgctccattgtacgaaccacaccaaagaaagaacatcttttactctaactgtggtattgttgctatgggctctattttgacctatttgtccatggttttctctccattaactgttttcatgtactacggtatcccatacttgggtgttaatgcttggattgtttgcattacttacttacaacacactgatccaaaggttcctcacttcagagacaacgaatggaattttcaaagaggtgccgcttgtaccatcgatagatccttcggtactattgtcaaccacttgcaccaccacatcggcgattcccaccaatgtcaccacatgttctctcaaatgccattctacaatgctgtcgaagctactaagtatctaaaggccaagctaggtaagtactacatcttcgacgacactccaattgccaaggctttgtacagaaactggagagaatgtaaattcgtcgaagacgaaggtgatgttgttttctacaagcactaa

SEQ ID NO: 809 - DNA, 1212 bp, Artificial sequence
  Delta-15 Desaturase
atggcccctccacacgtcgtcgacgaacaagttagaagaagaatcgttgttgaagacgagattaagtcaaagaaacaattcgagagaaactacgtcccaatggatttcactatcaaggaaatcagagacgctatccctgctcacttattcatcagagacacaactaagtcaattctacacgttgtcaaagatttggttaccattgccattgttttctactgtgctaccttcatcgaaactttgccatccttggctttgagagttccagcatggatcacctactggattattcaaggtaccgtcatggttggtccatggattttggctcacgaatgtggtcacggtgccttttctgaacacaagaggatcaactacattatcggttgggtcttgcattccgctttgttggttccttatcaggcatgggcaatgtcacactctaagcaccacaagggtactggttccatgactaaggatgttgtcttcattccagctactcgttcctacaaaggtctacctgccctagaaaagcctgctgttgaagaagaagtttctgaacaagaacatcaccaccatgaagaatccatctttgctgaaaccccaatctacactttgggtgccttgttgttcgttttaaccttcggttggccattgtacctaattgttaacttctctggtcacgaagccccacactgggtcaaccacttccaaactgttgctccattgtacgaaccacaccaaagaaagaacatcttttactctaactgtggtattgttgctatgggctctattttgacctatttgtccatggttttctctccattaactgttttcatgtactacggtatcccatacttgggtgttaatgcttggattgtttgcattacttacttacaacacactgatccaaaggttcctcacttcagagacaacgaatggaattttcaaagaggtgccgcttgtaccatcgatagatccttcggtactattgtcaaccacttgcaccaccacatcggcgattcccaccaatgtcaccacatgttctctcaaatgccattctacaatgctgtcgaagctactaagtatctaaaggccaagctaggtaagtactacatcttcgacgacactccaattgccaaggctttgtacagaaactggagagaatgtaaattcgtcgaagacgaaggtgatgttgttttctacaagcactaa

SEQ ID NO: 810 - DNA, 1212 bp, Artificial sequence
  Delta-15 Desaturase
atggcccctccacacgtcgtcgacgaacaagttagaagaagaatcgttgttgaagacgagattaagtcaaagaaacaattcgagagaaactacgtcccaatggatttcactatcaaggaaatcagagacgctatccctgctcacttattcatcagagacacaactaagtcaattctacacgttgtcaaagatttggttaccattgccattgttttctactgtgctaccttcatcgaaactttgccatccttggctttgagagttccagcatggatcacctactggattattcaaggtaccgtcatggttggtccatggattttggctcacgaatgtggtcacggtgccttttctcatcacaagaggatcaactccattatgggttgggtcttgcattccgctttgttggttccttatcaggcatgggcaatgtcacactctaagcaccacaagggtactggttccatgactaaggatgttgtcttcattccagctactcgttcctacaaaggtctacctgccctagaaaagcctgctgttgaagaagaagtttctgaacaagaacatcaccaccatgaagaatccatctttgctgaaaccccaatctacactttgggtgccttgttgttcgttttaaccttcggttggccattgtacctaattgttaacttctctggtcacgaagccccacactgggtcaaccacttccaaactgttgctccattgtacgaaccacaccaaagaaagaacatcttttactctaactgtggtattgttgctatgggctctattttgacctatttgtccatggttttctctccattaactgttttcatgtactacggtatcccatacttgggtgttaatgcttggattgtttgcattacttacttacaacacactgatccaaaggttcctcacttcagagacaacgaatggaattttcaaagaggtgccgcttgtaccatcgatagatccttcggtactattgtcaaccacttgcaccaccacatcggcgattcccaccaatgtcaccacatgttctctcaaatgccattctacaatgctgtcgaagctactaagtatctaaaggccaagctaggtaagtactacatcttcgacgacactccaattgccaaggctttgtacagaaactggagagaatgtaaattcgtcgaagacgaaggtgatgttgttttctacaagcactaa

SEQ ID NO: 811 - DNA, 1212 bp, Artificial sequence
  Delta-15 Desaturase
atggcccctccacacgtcgtcgacgaacaagttagaagaagaatcgttgttgaagacgagattaagtcaaagaaacaattcgagagaaactacgtcccaatggatttcactatcaaggaaatcagagacgctatccctgctcacttattcatcagagacacaactaagtcaattctacacgttgtcaaagatttggttaccattgccattgttttctactgtgctaccttcatcgaaactttgccatccttggctttgagagttccagcatggatcacctactggattattcaaggtaccgtcatggttggtccatggattttggctcacgaatgtggtcacggtgccttttctcatcacaagtcgttcaactacattttgggttgggtcttgcattccgctttgttggttccttatcaggcatgggcaatgtcacactctaagcaccacaagggtactggttccatgactaaggatgttgtcttcattccagctactcgttcctacaaaggtctacctgccctagaaaagcctgctgttgaagaagaagtttctgaacaagaacatcaccaccatgaagaatccatctttgctgaaaccccaatctacactttgggtgccttgttgttcgttttaaccttcggttggccattgtacctaattgttaacttctctggtcacgaagccccacactgggtcaaccacttccaaactgttgctccattgtacgaaccacaccaaagaaagaacatcttttactctaactgtggtattgttgctatgggctctattttgacctatttgtccatggttttctctccattaactgttttcatgtactacggtatcccatacttgggtgttaatgcttggattgtttgcattacttacttacaacacactgatccaaaggttcctcacttcagagacaacgaatggaattttcaaagaggtgccgcttgtaccatcgatagatccttcggtactattgtcaaccacttgcaccaccacatcggcgattcccaccaatgtcaccacatgttctctcaaatgccattctacaatgctgtcgaagctactaagtatctaaaggccaagctaggtaagtactacatcttcgacgacactccaattgccaaggctttgtacagaaactggagagaatgtaaattcgtcgaagacgaaggtgatgttgttttctacaagcactaa

SEQ ID NO: 812 - DNA, 1212 bp, Artificial sequence
  Delta-15 Desaturase
atggcccctccacacgtcgtcgacgaacaagttagaagaagaatcgttgttgaagacgagattaagtcaaagaaacaattcgagagaaactacgtcccaatggatttcactatcaaggaaatcagagacgctatccctgctcacttattcatcagagacacaactaagtcaattctacacgttgtcaaagatttggttaccattgccattgttttctactgtgctaccttcatcgaaactttgccatccttggctttgagagttccagcatggatcacctactggattattcaaggtaccgtcatggttggtccatggattttggctcacgaatgtggtcacggtgccttttctaactccaggacgttcaactacattatcggttgggtcttgcattccgctttgttggttccttatcaggcatgggcaatgtcacactctaagcaccacaagggtactggttccatgactaaggatgttgtcttcattccagctactcgttcctacaaaggtctacctgccctagaaaagcctgctgttgaagaagaagtttctgaacaagaacatcaccaccatgaagaatccatctttgctgaaaccccaatctacactttgggtgccttgttgttcgttttaaccttcggttggccattgtacctaattgttaacttctctggtcacgaagccccacactgggtcaaccacttccaaactgttgctccattgtacgaaccacaccaaagaaagaacatcttttactctaactgtggtattgttgctatgggctctattttgacctatttgtccatggttttctctccattaactgttttcatgtactacggtatcccatacttgggtgttaatgcttggattgtttgcattacttacttacaacacactgatccaaaggttcctcacttcagagacaacgaatggaattttcaaagaggtgccgcttgtaccatcgatagatccttcggtactattgtcaaccacttgcaccaccacatcggcgattcccaccaatgtcaccacatgttctctcaaatgccattctacaatgctgtcgaagctactaagtatctaaaggccaagctaggtaagtactacatcttcgacgacactccaattgccaaggctttgtacagaaactggagagaatgtaaattcgtcgaagacgaaggtgatgttgttttctacaagcactaa

SEQ ID NO: 813 - DNA, 1212 bp, Artificial sequence
  Delta-15 Desaturase
atggcccctccacacgtcgtcgacgaacaagttagaagaagaatcgttgttgaagacgagattaagtcaaagaaacaattcgagagaaactacgtcccaatggatttcactatcaaggaaatcagagacgctatccctgctcacttattcatcagagacacaactaagtcaattctacacgttgtcaaagatttggttaccattgccattgttttctactgtgctaccttcatcgaaactttgccatccttggctttgagagttccagcatggatcacctactggattattcaaggtaccgtcatggttggtccatggattttggctcacgaatgtggtcacggtgccttttctaagtccaggaggttcaactacattatgggttgggtcttgcattccgctttgttggttccttatcaggcatgggcaatgtcacactctaagcaccacaagggtactggttccatgactaaggatgttgtcttcattccagctactcgttcctacaaaggtctacctgccctagaaaagcctgctgttgaagaagaagtttctgaacaagaacatcaccaccatgaagaatccatctttgctgaaaccccaatctacactttgggtgccttgttgttcgttttaaccttcggttggccattgtacctaattgttaacttctctggtcacgaagccccacactgggtcaaccacttccaaactgttgctccattgtacgaaccacaccaaagaaagaacatcttttactctaactgtggtattgttgctatgggctctattttgacctatttgtccatggttttctctccattaactgttttcatgtactacggtatcccatacttgggtgttaatgcttggattgtttgcattacttacttacaacacactgatccaaaggttcctcacttcagagacaacgaatggaattttcaaagaggtgccgcttgtaccatcgatagatccttcggtactattgtcaaccacttgcaccaccacatcggcgattcccaccaatgtcaccacatgttctctcaaatgccattctacaatgctgtcgaagctactaagtatctaaaggccaagctaggtaagtactacatcttcgacgacactccaattgccaaggctttgtacagaaactggagagaatgtaaattcgtcgaagacgaaggtgatgttgttttctacaagcactaa

SEQ ID NO: 814 - DNA, 1212 bp, Artificial sequence
  Delta-15 Desaturase
atggcccctccacacgtcgtcgacgaacaagttagaagaagaatcgttgttgaagacgagattaagtcaaagaaacaattcgagagaaactacgtcccaatggatttcactatcaaggaaatcagagacgctatccctgctcacttattcatcagagacacaactaagtcaattctacacgttgtcaaagatttggttaccattgccattgttttctactgtgctaccttcatcgaaactttgccatccttggctttgagagttccagcatggatcacctactggattattcaaggtaccgtcatggttggtccatggattttggctcacgaatgtggtcacggtgccttttctaagtacacgtggatcaacaccattatgggttgggtcttgcattccgctttgttggttccttatcaggcatgggcaatgtcacactctaagcaccacaagggtactggttccatgactaaggatgttgtcttcattccagctactcgttcctacaaaggtctacctgccctagaaaagcctgctgttgaagaagaagtttctgaacaagaacatcaccaccatgaagaatccatctttgctgaaaccccaatctacactttgggtgccttgttgttcgttttaaccttcggttggccattgtacctaattgttaacttctctggtcacgaagccccacactgggtcaaccacttccaaactgttgctccattgtacgaaccacaccaaagaaagaacatcttttactctaactgtggtattgttgctatgggctctattttgacctatttgtccatggttttctctccattaactgttttcatgtactacggtatcccatacttgggtgttaatgcttggattgtttgcattacttacttacaacacactgatccaaaggttcctcacttcagagacaacgaatggaattttcaaagaggtgccgcttgtaccatcgatagatccttcggtactattgtcaaccacttgcaccaccacatcggcgattcccaccaatgtcaccacatgttctctcaaatgccattctacaatgctgtcgaagctactaagtatctaaaggccaagctaggtaagtactacatcttcgacgacactccaattgccaaggctttgtacagaaactggagagaatgtaaattcgtcgaagacgaaggtgatgttgttttctacaagcactaa

SEQ ID NO: 815 - DNA, 1212 bp, Artificial sequence
  Delta-15 Desaturase
atggcccctccacacgtcgtcgacgaacaagttagaagaagaatcgttgttgaagacgagattaagtcaaagaaacaattcgagagaaactacgtcccaatggatttcactatcaaggaaatcagagacgctatccctgctcacttattcatcagagacacaactaagtcaattctacacgttgtcaaagatttggttaccattgccattgttttctactgtgctaccttcatcgaaactttgccatccttggctttgagagttccagcatggatcacctactggattattcaaggtaccgtcatggttggtccatggattttggctcacgaatgtggtcacggtgccttttctaactacaggtggttcaacaacattttgggttgggtcttgcattccgctttgttggttccttatcaggcatgggcaatgtcacactctaagcaccacaagggtactggttccatgactaaggatgttgtcttcattccagctactcgttcctacaaaggtctacctgccctagaaaagcctgctgttgaagaagaagtttctgaacaagaacatcaccaccatgaagaatccatctttgctgaaaccccaatctacactttgggtgccttgttgttcgttttaaccttcggttggccattgtacctaattgttaacttctctggtcacgaagccccacactgggtcaaccacttccaaactgttgctccattgtacgaaccacaccaaagaaagaacatcttttactctaactgtggtattgttgctatgggctctattttgacctatttgtccatggttttctctccattaactgttttcatgtactacggtatcccatacttgggtgttaatgcttggattgtttgcattacttacttacaacacactgatccaaaggttcctcacttcagagacaacgaatggaattttcaaagaggtgccgcttgtaccatcgatagatccttcggtactattgtcaaccacttgcaccaccacatcggcgattcccaccaatgtcaccacatgttctctcaaatgccattctacaatgctgtcgaagctactaagtatctaaaggccaagctaggtaagtactacatcttcgacgacactccaattgccaaggctttgtacagaaactggagagaatgtaaattcgtcgaagacgaaggtgatgttgttttctacaagcactaa

SEQ ID NO: 816 - DNA, 1212 bp, Artificial sequence
  Delta-15 Desaturase
atggcccctccacacgtcgtcgacgaacaagttagaagaagaatcgttgttgaagacgagattaagtcaaagaaacaattcgagagaaactacgtcccaatggatttcactatcaaggaaatcagagacgctatccctgctcacttattcatcagagacacaactaagtcaattctacacgttgtcaaagatttggttaccattgccattgttttctactgtgctaccttcatcgaaactttgccatccttggctttgagagttccagcatggatcacctactggattattcaaggtaccgtcatggttggtccatggattttggctcacgaatgtggtcacggtgccttttctaagtccaggacgatcaacaccattatgggttgggtcttgcattccgctttgttggttccttatcaggcatgggcaatgtcacactctaagcaccacaagggtactggttccatgactaaggatgttgtcttcattccagctactcgttcctacaaaggtctacctgccctagaaaagcctgctgttgaagaagaagtttctgaacaagaacatcaccaccatgaagaatccatctttgctgaaaccccaatctacactttgggtgccttgttgttcgttttaaccttcggttggccattgtacctaattgttaacttctctggtcacgaagccccacactgggtcaaccacttccaaactgttgctccattgtacgaaccacaccaaagaaagaacatcttttactctaactgtggtattgttgctatgggctctattttgacctatttgtccatggttttctctccattaactgttttcatgtactacggtatcccatacttgggtgttaatgcttggattgtttgcattacttacttacaacacactgatccaaaggttcctcacttcagagacaacgaatggaattttcaaagaggtgccgcttgtaccatcgatagatccttcggtactattgtcaaccacttgcaccaccacatcggcgattcccaccaatgtcaccacatgttctctcaaatgccattctacaatgctgtcgaagctactaagtatctaaaggccaagctaggtaagtactacatcttcgacgacactccaattgccaaggctttgtacagaaactggagagaatgtaaattcgtcgaagacgaaggtgatgttgttttctacaagcactaa

SEQ ID NO: 817 - DNA, 1212 bp, Artificial sequence
  Delta-15 Desaturase
atggcccctccacacgtcgtcgacgaacaagttagaagaagaatcgttgttgaagacgagattaagtcaaagaaacaattcgagagaaactacgtcccaatggatttcactatcaaggaaatcagagacgctatccctgctcacttattcatcagagacacaactaagtcaattctacacgttgtcaaagatttggttaccattgccattgttttctactgtgctaccttcatcgaaactttgccatccttggctttgagagttccagcatggatcacctactggattattcaaggtaccgtcatggttggtccatggattttggctcacgaatgtggtcacggtgccttttctaagtacacgaggttcaacaccattttcggttgggtcttgcattccgctttgttggttccttatcaggcatgggcaatgtcacactctaagcaccacaagggtactggttccatgactaaggatgttgtcttcattccagctactcgttcctacaaaggtctacctgccctagaaaagcctgctgttgaagaagaagtttctgaacaagaacatcaccaccatgaagaatccatctttgctgaaaccccaatctacactttgggtgccttgttgttcgttttaaccttcggttggccattgtacctaattgttaacttctctggtcacgaagccccacactgggtcaaccacttccaaactgttgctccattgtacgaaccacaccaaagaaagaacatcttttactctaactgtggtattgttgctatgggctctattttgacctatttgtccatggttttctctccattaactgttttcatgtactacggtatcccatacttgggtgttaatgcttggattgtttgcattacttacttacaacacactgatccaaaggttcctcacttcagagacaacgaatggaattttcaaagaggtgccgcttgtaccatcgatagatccttcggtactattgtcaaccacttgcaccaccacatcggcgattcccaccaatgtcaccacatgttctctcaaatgccattctacaatgctgtcgaagctactaagtatctaaaggccaagctaggtaagtactacatcttcgacgacactccaattgccaaggctttgtacagaaactggagagaatgtaaattcgtcgaagacgaaggtgatgttgttttctacaagcactaa

SEQ ID NO: 818 - DNA, 1212 bp, Artificial sequence
  Delta-15 Desaturase
atggcccctccacacgtcgtcgacgaacaagttagaagaagaatcgttgttgaagacgagattaagtcaaagaaacaattcgagagaaactacgtcccaatggatttcactatcaaggaaatcagagacgctatccctgctcacttattcatcagagacacaactaagtcaattctacacgttgtcaaagatttggttaccattgccattgttttctactgtgctaccttcatcgaaactttgccatccttggctttgagagttccagcatggatcacctactggattattcaaggtaccgtcatggttggtccatggattttggctcacgaatgtggtcacggtgccttttctaactccacgaggttcaacaccattttcggttgggtcttgcattccgctttgttggttccttatcaggcatgggcaatgtcacactctaagcaccacaagggtactggttccatgactaaggatgttgtcttcattccagctactcgttcctacaaaggtctacctgccctagaaaagcctgctgttgaagaagaagtttctgaacaagaacatcaccaccatgaagaatccatctttgctgaaaccccaatctacactttgggtgccttgttgttcgttttaaccttcggttggccattgtacctaattgttaacttctctggtcacgaagccccacactgggtcaaccacttccaaactgttgctccattgtacgaaccacaccaaagaaagaacatcttttactctaactgtggtattgttgctatgggctctattttgacctatttgtccatggttttctctccattaactgttttcatgtactacggtatcccatacttgggtgttaatgcttggattgtttgcattacttacttacaacacactgatccaaaggttcctcacttcagagacaacgaatggaattttcaaagaggtgccgcttgtaccatcgatagatccttcggtactattgtcaaccacttgcaccaccacatcggcgattcccaccaatgtcaccacatgttctctcaaatgccattctacaatgctgtcgaagctactaagtatctaaaggccaagctaggtaagtactacatcttcgacgacactccaattgccaaggctttgtacagaaactggagagaatgtaaattcgtcgaagacgaaggtgatgttgttttctacaagcactaa

SEQ ID NO: 819 - DNA, 1212 bp, Artificial sequence
  Delta-15 Desaturase
atggcccctccacacgtcgtcgacgaacaagttagaagaagaatcgttgttgaagacgagattaagtcaaagaaacaattcgagagaaactacgtcccaatggatttcactatcaaggaaatcagagacgctatccctgctcacttattcatcagagacacaactaagtcaattctacacgttgtcaaagatttggttaccattgccattgttttctactgtgctaccttcatcgaaactttgccatccttggctttgagagttccagcatggatcacctactggattattcaaggtaccgtcatggttggtccatggattttggctcacgaatgtggtcacggtgccttttctcaacccacgacgatcaacaccattatcggttgggtcttgcattccgctttgttggttccttatcaggcatgggcaatgtcacactctaagcaccacaagggtactggttccatgactaaggatgttgtcttcattccagctactcgttcctacaaaggtctacctgccctagaaaagcctgctgttgaagaagaagtttctgaacaagaacatcaccaccatgaagaatccatctttgctgaaaccccaatctacactttgggtgccttgttgttcgttttaaccttcggttggccattgtacctaattgttaacttctctggtcacgaagccccacactgggtcaaccacttccaaactgttgctccattgtacgaaccacaccaaagaaagaacatcttttactctaactgtggtattgttgctatgggctctattttgacctatttgtccatggttttctctccattaactgttttcatgtactacggtatcccatacttgggtgttaatgcttggattgtttgcattacttacttacaacacactgatccaaaggttcctcacttcagagacaacgaatggaattttcaaagaggtgccgcttgtaccatcgatagatccttcggtactattgtcaaccacttgcaccaccacatcggcgattcccaccaatgtcaccacatgttctctcaaatgccattctacaatgctgtcgaagctactaagtatctaaaggccaagctaggtaagtactacatcttcgacgacactccaattgccaaggctttgtacagaaactggagagaatgtaaattcgtcgaagacgaaggtgatgttgttttctacaagcactaa

SEQ ID NO: 820 - DNA, 1212 bp, Artificial sequence
  Delta-15 Desaturase
atggcccctccacacgtcgtcgacgaacaagttagaagaagaatcgttgttgaagacgagattaagtcaaagaaacaattcgagagaaactacgtcccaatggatttcactatcaaggaaatcagagacgctatccctgctcacttattcatcagagacacaactaagtcaattctacacgttgtcaaagatttggttaccattgccattgttttctactgtgctaccttcatcgaaactttgccatccttggctttgagagttccagcatggatcacctactggattattcaaggtaccgtcatggttggtccatggattttggctcacgaatgtggtcacggtgccttttctaactacacgacgttcaacaccattatcggttgggtcttgcattccgctttgttggttccttatcaggcatgggcaatgtcacactctaagcaccacaagggtactggttccatgactaaggatgttgtcttcattccagctactcgttcctacaaaggtctacctgccctagaaaagcctgctgttgaagaagaagtttctgaacaagaacatcaccaccatgaagaatccatctttgctgaaaccccaatctacactttgggtgccttgttgttcgttttaaccttcggttggccattgtacctaattgttaacttctctggtcacgaagccccacactgggtcaaccacttccaaactgttgctccattgtacgaaccacaccaaagaaagaacatcttttactctaactgtggtattgttgctatgggctctattttgacctatttgtccatggttttctctccattaactgttttcatgtactacggtatcccatacttgggtgttaatgcttggattgtttgcattacttacttacaacacactgatccaaaggttcctcacttcagagacaacgaatggaattttcaaagaggtgccgcttgtaccatcgatagatccttcggtactattgtcaaccacttgcaccaccacatcggcgattcccaccaatgtcaccacatgttctctcaaatgccattctacaatgctgtcgaagctactaagtatctaaaggccaagctaggtaagtactacatcttcgacgacactccaattgccaaggctttgtacagaaactggagagaatgtaaattcgtcgaagacgaaggtgatgttgttttctacaagcactaa

SEQ ID NO: 821 - DNA, 1212 bp, Artificial sequence
  Delta-15 Desaturase
atggcccctccacacgtcgtcgacgaacaagttagaagaagaatcgttgttgaagacgagattaagtcaaagaaacaattcgagagaaactacgtcccaatggatttcactatcaaggaaatcagagacgctatccctgctcacttattcatcagagacacaactaagtcaattctacacgttgtcaaagatttggttaccattgccattgttttctactgtgctaccttcatcgaaactttgccatccttggctttgagagttccagcatggatcacctactggattattcaaggtaccgtcatggttggtccatggattttggctcacgaatgtggtcacggtgccttttctgagcacaagacgatcaactccattttcggttgggtcttgcattccgctttgttggttccttatcaggcatgggcaatgtcacactctaagcaccacaagggtactggttccatgactaaggatgttgtcttcattccagctactcgttcctacaaaggtctacctgccctagaaaagcctgctgttgaagaagaagtttctgaacaagaacatcaccaccatgaagaatccatctttgctgaaaccccaatctacactttgggtgccttgttgttcgttttaaccttcggttggccattgtacctaattgttaacttctctggtcacgaagccccacactgggtcaaccacttccaaactgttgctccattgtacgaaccacaccaaagaaagaacatcttttactctaactgtggtattgttgctatgggctctattttgacctatttgtccatggttttctctccattaactgttttcatgtactacggtatcccatacttgggtgttaatgcttggattgtttgcattacttacttacaacacactgatccaaaggttcctcacttcagagacaacgaatggaattttcaaagaggtgccgcttgtaccatcgatagatccttcggtactattgtcaaccacttgcaccaccacatcggcgattcccaccaatgtcaccacatgttctctcaaatgccattctacaatgctgtcgaagctactaagtatctaaaggccaagctaggtaagtactacatcttcgacgacactccaattgccaaggctttgtacagaaactggagagaatgtaaattcgtcgaagacgaaggtgatgttgttttctacaagcactaa

SEQ ID NO: 822 - DNA, 1212 bp, Artificial sequence
  Delta-15 Desaturase
atggcccctccacacgtcgtcgacgaacaagttagaagaagaatcgttgttgaagacgagattaagtcaaagaaacaattcgagagaaactacgtcccaatggatttcactatcaaggaaatcagagacgctatccctgctcacttattcatcagagacacaactaagtcaattctacacgttgtcaaagatttggttaccattgccattgttttctactgtgctaccttcatcgaaactttgccatccttggctttgagagttccagcatggatcacctactggattattcaaggtaccgtcatggttggtccatggattttggctcacgaatgtggtcacggtgccttttctaagcacaagacgttcaactccattatcggttgggtcttgcattccgctttgttggttccttatcaggcatgggcaatgtcacactctaagcaccacaagggtactggttccatgactaaggatgttgtcttcattccagctactcgttcctacaaaggtctacctgccctagaaaagcctgctgttgaagaagaagtttctgaacaagaacatcaccaccatgaagaatccatctttgctgaaaccccaatctacactttgggtgccttgttgttcgttttaaccttcggttggccattgtacctaattgttaacttctctggtcacgaagccccacactgggtcaaccacttccaaactgttgctccattgtacgaaccacaccaaagaaagaacatcttttactctaactgtggtattgttgctatgggctctattttgacctatttgtccatggttttctctccattaactgttttcatgtactacggtatcccatacttgggtgttaatgcttggattgtttgcattacttacttacaacacactgatccaaaggttcctcacttcagagacaacgaatggaattttcaaagaggtgccgcttgtaccatcgatagatccttcggtactattgtcaaccacttgcaccaccacatcggcgattcccaccaatgtcaccacatgttctctcaaatgccattctacaatgctgtcgaagctactaagtatctaaaggccaagctaggtaagtactacatcttcgacgacactccaattgccaaggctttgtacagaaactggagagaatgtaaattcgtcgaagacgaaggtgatgttgttttctacaagcactaa

SEQ ID NO: 823 - DNA, 1212 bp, Artificial sequence
  Delta-15 Desaturase
atggcccctccacacgtcgtcgacgaacaagttagaagaagaatcgttgttgaagacgagattaagtcaaagaaacaattcgagagaaactacgtcccaatggatttcactatcaaggaaatcagagacgctatccctgctcacttattcatcagagacacaactaagtcaattctacacgttgtcaaagatttggttaccattgccattgttttctactgtgctaccttcatcgaaactttgccatccttggctttgagagttccagcatggatcacctactggattattcaaggtaccgtcatggttggtccatggattttggctcacgaatgtggtcacggtgccttttctcatcacaggaggatcaactacattatcggttgggtcttgcattccgctttgttggttccttatcaggcatgggcaatgtcacactctaagcaccacaagggtactggttccatgactaaggatgttgtcttcattccagctactcgttcctacaaaggtctacctgccctagaaaagcctgctgttgaagaagaagtttctgaacaagaacatcaccaccatgaagaatccatctttgctgaaaccccaatctacactttgggtgccttgttgttcgttttaaccttcggttggccattgtacctaattgttaacttctctggtcacgaagccccacactgggtcaaccacttccaaactgttgctccattgtacgaaccacaccaaagaaagaacatcttttactctaactgtggtattgttgctatgggctctattttgacctatttgtccatggttttctctccattaactgttttcatgtactacggtatcccatacttgggtgttaatgcttggattgtttgcattacttacttacaacacactgatccaaaggttcctcacttcagagacaacgaatggaattttcaaagaggtgccgcttgtaccatcgatagatccttcggtactattgtcaaccacttgcaccaccacatcggcgattcccaccaatgtcaccacatgttctctcaaatgccattctacaatgctgtcgaagctactaagtatctaaaggccaagctaggtaagtactacatcttcgacgacactccaattgccaaggctttgtacagaaactggagagaatgtaaattcgtcgaagacgaaggtgatgttgttttctacaagcactaa

SEQ ID NO: 824 - DNA, 1212 bp, Artificial sequence
  Delta-15 Desaturase
atggcccctccacacgtcgtcgacgaacaagttagaagaagaatcgttgttgaagacgagattaagtcaaagaaacaattcgagagaaactacgtcccaatggatttcactatcaaggaaatcagagacgctatccctgctcacttattcatcagagacacaactaagtcaattctacacgttgtcaaagatttggttaccattgccattgttttctactgtgctaccttcatcgaaactttgccatccttggctttgagagttccagcatggatcacctactggattattcaaggtaccgtcatggttggtccatggattttggctcacgaatgtggtcacggtgccttttctaaatccaagtcgatcaactccattttcggttgggtcttgcattccgctttgttggttccttatcaggcatgggcaatgtcacactctaagcaccacaagggtactggttccatgactaaggatgttgtcttcattccagctactcgttcctacaaaggtctacctgccctagaaaagcctgctgttgaagaagaagtttctgaacaagaacatcaccaccatgaagaatccatctttgctgaaaccccaatctacactttgggtgccttgttgttcgttttaaccttcggttggccattgtacctaattgttaacttctctggtcacgaagccccacactgggtcaaccacttccaaactgttgctccattgtacgaaccacaccaaagaaagaacatcttttactctaactgtggtattgttgctatgggctctattttgacctatttgtccatggttttctctccattaactgttttcatgtactacggtatcccatacttgggtgttaatgcttggattgtttgcattacttacttacaacacactgatccaaaggttcctcacttcagagacaacgaatggaattttcaaagaggtgccgcttgtaccatcgatagatccttcggtactattgtcaaccacttgcaccaccacatcggcgattcccaccaatgtcaccacatgttctctcaaatgccattctacaatgctgtcgaagctactaagtatctaaaggccaagctaggtaagtactacatcttcgacgacactccaattgccaaggctttgtacagaaactggagagaatgtaaattcgtcgaagacgaaggtgatgttgttttctacaagcactaa

SEQ ID NO: 825 - DNA, 1212 bp, Artificial sequence
  Delta-15 Desaturase
atggcccctccacacgtcgtcgacgaacaagttagaagaagaatcgttgttgaagacgagattaagtcaaagaaacaattcgagagaaactacgtcccaatggatttcactatcaaggaaatcagagacgctatccctgctcacttattcatcagagacacaactaagtcaattctacacgttgtcaaagatttggttaccattgccattgttttctactgtgctaccttcatcgaaactttgccatccttggctttgagagttccagcatggatcacctactggattattcaaggtaccgtcatggttggtccatggattttggctcacgaatgtggtcacggtgccttttctaattccaggtggatcaacaccattttgggttgggtcttgcattccgctttgttggttccttatcaggcatgggcaatgtcacactctaagcaccacaagggtactggttccatgactaaggatgttgtcttcattccagctactcgttcctacaaaggtctacctgccctagaaaagcctgctgttgaagaagaagtttctgaacaagaacatcaccaccatgaagaatccatctttgctgaaaccccaatctacactttgggtgccttgttgttcgttttaaccttcggttggccattgtacctaattgttaacttctctggtcacgaagccccacactgggtcaaccacttccaaactgttgctccattgtacgaaccacaccaaagaaagaacatcttttactctaactgtggtattgttgctatgggctctattttgacctatttgtccatggttttctctccattaactgttttcatgtactacggtatcccatacttgggtgttaatgcttggattgtttgcattacttacttacaacacactgatccaaaggttcctcacttcagagacaacgaatggaattttcaaagaggtgccgcttgtaccatcgatagatccttcggtactattgtcaaccacttgcaccaccacatcggcgattcccaccaatgtcaccacatgttctctcaaatgccattctacaatgctgtcgaagctactaagtatctaaaggccaagctaggtaagtactacatcttcgacgacactccaattgccaaggctttgtacagaaactggagagaatgtaaattcgtcgaagacgaaggtgatgttgttttctacaagcactaa

SEQ ID NO: 826 - DNA, 1212 bp, Artificial sequence
  Delta-15 Desaturase
atggcccctccacacgtcgtcgacgaacaagttagaagaagaatcgttgttgaagacgagattaagtcaaagaaacaattcgagagaaactacgtcccaatggatttcactatcaaggaaatcagagacgctatccctgctcacttattcatcagagacacaactaagtcaattctacacgttgtcaaagatttggttaccattgccattgttttctactgtgctaccttcatcgaaactttgccatccttggctttgagagttccagcatggatcacctactggattattcaaggtaccgtcatggttggtccatggattttggctcacgaatgtggtcacggtgccttttctaaccacaagaggttcaactccattttgggttgggtcttgcattccgctttgttggttccttatcaggcatgggcaatgtcacactctaagcaccacaagggtactggttccatgactaaggatgtggtcttcattccagctactcgttcctacaaaggtctacctgccctagaaaagcctgctgttgaagaagaagtttctgaacaagaacatcaccaccatgaagaatccatctttgctgaaaccccaatctacactttgggtgccttgttgttcgttttaaccttcggttggccattgtacctaattgttaacttctctggtcacgaagccccacactgggtcaaccacttccaaactgttgctccattgtacgaaccacaccaaagaaagaacatcttttactctaactgtggtattgttgctatgggctctattttgacctatttgtccatggttttctctccattaactgttttcatgtactacggtatcccatacttgggtgttaatgcttggattgtttgcattacttacttacaacacactgatccaaaggttcctcacttcagagacaacgaatggaattttcaaagaggtgccgcttgtaccatcgatagatccttcggtactattgtcaaccacttgcaccaccacatcggcgattcccaccaatgtcaccacatgttctctcaaatgccattctacaatgctgtcgaagctactaagtatctaaaggccaagctaggtaagtactacatcttcgacgacactccaattgccaaggctttgtacagaaactggagagaatgtaaattcgtcgaagacgaaggtgatgttgttttctacaagcactaa

SEQ ID NO: 827 - DNA, 1212 bp, Artificial sequence
  Delta-15 Desaturase
atggcccctccacacgtcgtcgacgaacaagttagaagaagaatcgttgttgaagacgagattaagtcaaagaaacaattcgagagaaactacgtcccaatggatttcactatcaaggaaatcagagacgctatccctgctcacttattcatcagagacacaactaagtcaattctacacgttgtcaaagatttggttaccattgccattgttttctactgtgctaccttcatcgaaactttgccatccttggctttgagagttccagcatggatcacctactggattattcaaggtaccgtcatggttggtccatggattttggctcacgaatgtggtcacggtgccttttctgaccccaggaggatcaactacattttcggttgggtcttgcattccgctttgttggttccttatcaggcatgggcaatgtcacactctaagcaccacaagggtactggttccatgactaaggatgttgtcttcattccagctactcgttcctacaaaggtctacctgccctagaaaagcctgctgttgaagaagaagtttctgaacaagaacatcaccaccatgaagaatccatctttgctgaaaccccaatctacactttgggtgccttgttgttcgttttaaccttcggttggccattgtacctaattgttaacttctctggtcacgaagccccacactgggtcaaccacttccaaactgttgctccattgtacgaaccacaccaaagaaagaacatcttttactctaactgtggtattgttgctatgggctctattttgacctatttgtccatggttttctctccattaactgttttcatgtactacggtatcccatacttgggtgttaatgcttggattgtttgcattacttacttacaacacactgatccaaaggttcctcacttcagagacaacgaatggaattttcaaagaggtgccgcttgtaccatcgatagatccttcggtactattgtcaaccacttgcaccaccacatcggcgattcccaccaatgtcaccacatgttctctcaaatgccattctacaatgctgtcgaagctactaagtatctaaaggccaagctaggtaagtactacatcttcgacgacactccaattgccaaggctttgtacagaaactggagagaatgtaaattcgtcgaagacgaaggtgatgttgttttctacaagcactaa

SEQ ID NO: 828 - DNA, 1212 bp, Artificial sequence
  Delta-15 Desaturase
atggcccctccacacgtcgtcgacgaacaagttagaagaagaatcgttgttgaagacgagattaagtcaaagaaacaattcgagagaaactacgtcccaatggatttcactatcaaggaaatcagagacgctatccctgctcacttattcatcagagacacaactaagtcaattctacacgttgtcaaagatttggttaccattgccattgttttctactgtgctaccttcatcgaaactttgccatccttggctttgagagttccagcatggatcacctactggattattcaaggtaccgtcatggttggtccatggattttggctcacgaatgtggtcacggtgccttttctcatcccaagtggatcaactccattttgggttgggtcttgcattccgctttgttggttccttatcaggcatgggcaatgtcacactctaagcaccacaagggtactggttccatgactaaggatgttgtcttcattccagctactcgttcctacaaaggtctacctgccctagaaaagcctgctgttgaagaagaagtttctgaacaagaacatcaccaccatgaagaatccatctttgctgaaaccccaatctacactttgggtgccttgttgttcgttttaaccttcggttggccattgtacctaattgttaacttctctggtcacgaagccccacactgggtcaaccacttccaaactgttgctccattgtacgaaccacaccaaagaaagaacatcttttactctaactgtggtattgttgctatgggctctattttgacctatttgtccatggttttctctccattaactgttttcatgtactacggtatcccatacttgggtgttaatgcttggattgtttgcattacttacttacaacacactgatccaaaggttcctcacttcagagacaacgaatggaattttcaaagaggtgccgcttgtaccatcgatagatccttcggtactattgtcaaccacttgcaccaccacatcggcgattcccaccaatgtcaccacatgttctctcaaatgccattctacaatgctgtcgaagctactaagtatctaaaggccaagctaggtaagtactacatcttcgacgacactccaattgccaaggctttgtacagaaactggagagaatgtaaattcgtcgaagacgaaggtgatgttgttttctacaagcactaa

SEQ ID NO: 829 - DNA, 1212 bp, Artificial sequence
  Delta-15 Desaturase
atggcccctccacacgtcgtcgacgaacaagttagaagaagaatcgttgttgaagacgagattaagtcaaagaaacaattcgagagaaactacgtcccaatggatttcactatcaaggaaatcagagacgctatccctgctcacttattcatcagagacacaactaagtcaattctacacgttgtcaaagatttggttaccattgccattgttttctactgtgctaccttcatcgaaactttgccatccttggctttgagagttccagcatggatcacctactggattattcaaggtaccgtcatggttggtccatggattttggctcacgaatgtggtcacggtgccttttctgaatacaggtcgatcaacaccattatcggttgggtcttgcattccgctttgttggttccttatcaggcatgggcaatgtcacactctaagcaccacaagggtactggttccatgactaaggatgttgtcttcattccagctactcgttcctacaaaggtctacctgccctagaaaagcctgctgttgaagaagaagtttctgaacaagaacatcaccaccatgaagaatccatctttgctgaaaccccaatctacactttgggtgccttgttgttcgttttaaccttcggttggccattgtacctaattgttaacttctctggtcacgaagccccacactgggtcaaccacttccaaactgttgctccattgtacgaaccacaccaaagaaagaacatcttttactctaactgtggtattgttgctatgggctctattttgacctatttgtccatggttttctctccattaactgttttcatgtactacggtatcccatacttgggtgttaatgcttggattgtttgcattacttacttacaacacactgatccaaaggttcctcacttcagagacaacgaatggaattttcaaagaggtgccgcttgtaccatcgatagatccttcggtactattgtcaaccacttgcaccaccacatcggcgattcccaccaatgtcaccacatgttctctcaaatgccattctacaatgctgtcgaagctactaagtatctaaaggccaagctaggtaagtactacatcttcgacgacactccaattgccaaggctttgtacagaaactggagagaatgtaaattcgtcgaagacgaaggtgatgttgttttctacaagcactaa

SEQ ID NO: 830 - DNA, 1212 bp, Artificial sequence
  Delta-15 Desaturase
atggcccctccacacgtcgtcgacgaacaagttagaagaagaatcgttgttgaagacgagattaagtcaaagaaacaattcgagagaaactacgtcccaatggatttcactatcaaggaaatcagagacgctatccctgctcacttattcatcagagacacaactaagtcaattctacacgttgtcaaagatttggttaccattgccattgttttctactgtgctaccttcatcgaaactttgccatccttggctttgagagttccagcatggatcacctactggattattcaaggtaccgtcatggttggtccatggattttggctcacgaatgtggtcacggtgccttttctaaacacacgtggttcaactacattttcggttgggtcttgcattccgctttgttggttccttatcaggcatgggcaatgtcacactctaagcaccacaagggtactggttccatgactaaggatgttgtcttcattccagctactcgttcctacaaaggtctacctgccctagaaaagcctgctgttgaagaagaagtttctgaacaagaacatcaccaccatgaagaatccatctttgctgaaaccccaatctacactttgggtgccttgttgttcgttttaaccttcggttggccattgtacctaattgttaacttctctggtcacgaagccccacactgggtcaaccacttccaaactgttgctccattgtacgaaccacaccaaagaaagaacatcttttactctaactgtggtattgttgctatgggctctattttgacctatttgtccatggttttctctccattaactgttttcatgtactacggtatcccatacttgggtgttaatgcttggattgtttgcattacttacttacaacacactgatccaaaggttcctcacttcagagacaacgaatggaattttcaaagaggtgccgcttgtaccatcgatagatccttcggtactattgtcaaccacttgcaccaccacatcggcgattcccaccaatgtcaccacatgttctctcaaatgccattctacaatgctgtcgaagctactaagtatctaaaggccaagctaggtaagtactacatcttcgacgacactccaattgccaaggctttgtacagaaactggagagaatgtaaattcgtcgaagacgaaggtgatgttgttttctacaagcactaa

SEQ ID NO: 831 - DNA, 1212 bp, Artificial sequence
  Delta-15 Desaturase
atggcccctccacacgtcgtcgacgaacaagttagaagaagaatcgttgttgaagacgagattaagtcaaagaaacaattcgagagaaactacgtcccaatggatttcactatcaaggaaatcagagacgctatccctgctcacttattcatcagagacacaactaagtcaattctacacgttgtcaaagatttggttaccattgccattgttttctactgtgctaccttcatcgaaactttgccatccttggctttgagagttccagcatggatcacctactggattattcaaggtaccgtcatggttggtccatggattttggctcacgaatgtggtcacggtgccttttctaatcacacgtcgttcaactccattttcggttgggtcttgcattccgctttgttggttccttatcaggcatgggcaatgtcacactctaagcaccacaagggtactggttccatgactaaggatgttgtcttcattccagctactcgttcctacaaaggtctacctgccctagaaaagcctgctgttgaagaagaagtttctgaacaagaacatcaccaccatgaagaatccatctttgctgaaaccccaatctacactttgggtgccttgttgttcgttttaaccttcggttggccattgtacctaattgttaacttctctggtcacgaagccccacactgggtcaaccacttccaaactgttgctccattgtacgaaccacaccaaagaaagaacatcttttactctaactgtggtattgttgctatgggctctattttgacctatttgtccatggttttctctccattaactgttttcatgtactacggtatcccatacttgggtgttaatgcttggattgtttgcattacttacttacaacacactgatccaaaggttcctcacttcagagacaacgaatggaattttcaaagaggtgccgcttgtaccatcgatagatccttcggtactattgtcaaccacttgcaccaccacatcggcgattcccaccaatgtcaccacatgttctctcaaatgccattctacaatgctgtcgaagctactaagtatctaaaggccaagctaggtaagtactacatcttcgacgacactccaattgccaaggctttgtacagaaactggagagaatgtaaattcgtcgaagacgaaggtgatgttgttttctacaagcactaa

SEQ ID NO: 832 - DNA, 1212 bp, Artificial sequence
  Delta-15 Desaturase
atggcccctccacacgtcgtcgacgaacaagttagaagaagaatcgttgttgaagacgagattaagtcaaagaaacaattcgagagaaactacgtcccaatggatttcactatcaaggaaatcagagacgctatccctgctcacttattcatcagagacacaactaagtcaattctacacgttgtcaaagatttggttaccattgccattgttttctactgtgctaccttcatcgaaactttgccatccttggctttgagagttccagcatggatcacctactggattattcaaggtaccgtcatggttggtccatggattttggctcacgaatgtggtcacggtgccttttctaactacacgaggatcaacaccattatcggttgggtcttgcattccgctttgttggttccttatcaggcatgggcaatgtcacactctaagcaccacaagggtactggttccatgactaaggatgttgtcttcattccagctactcgttcctacaaaggtctacctgccctagaaaagcctgctgttgaagaagaagtttctgaacaagaacatcaccaccatgaagaatccatctttgctgaaaccccaatctacactttgggtgccttgttgttcgttttaaccttcggttggccattgtacctaattgttaacttctctggtcacgaagccccacactgggtcaaccacttccaaactgttgctccattgtacgaaccacaccaaagaaagaacatcttttactctaactgtggtattgttgctatgggctctattttgacctatttgtccatggttttctctccattaactgttttcatgtactacggtatcccatacttgggtgttaatgcttggattgtttgcattacttacttacaacacactgatccaaaggttcctcacttcagagacaacgaatggaattttcaaagaggtgccgcttgtaccatcgatagatccttcggtactattgtcaaccacttgcaccaccacatcggcgattcccaccaatgtcaccacatgttctctcaaatgccattctacaatgctgtcgaagctactaagtatctaaaggccaagctaggtaagtactacatcttcgacgacactccaattgccaaggctttgtacagaaactggagagaatgtaaattcgtcgaagacgaaggtgatgttgttttctacaagcactaa

SEQ ID NO: 833 - DNA, 1212 bp, Artificial sequence
  Delta-15 Desaturase
atggcccctccacacgtcgtcgacgaacaagttagaagaagaatcgttgttgaagacgagattaagtcaaagaaacaattcgagagaaactacgtcccaatggatttcactatcaaggaaatcagagacgctatccctgctcacttattcatcagagacacaactaagtcaattctacacgttgtcaaagatttggttaccattgccattgttttctactgtgctaccttcatcgaaactttgccatccttggctttgagagttccagcatggatcacctactggattattcaaggtaccgtcatggttggtccatggattttggctcacgaatgtggtcacggtgccttttctcactacacgtcgatcaactacattatcggttgggtcttgcattccgctttgttggttccttatcaggcatgggcaatgtcacactctaagcaccacaagggtactggttccatgactaaggatgttgtcttcattccagctactcgttcctacaaaggtctacctgccctagaaaagcctgctgttgaagaagaagtttctgaacaagaacatcaccaccatgaagaatccatctttgctgaaaccccaatctacactttgggtgccttgttgttcgttttaaccttcggttggccattgtacctaattgttaacttctctggtcacgaagccccacactgggtcaaccacttccaaactgttgctccattgtacgaaccacaccaaagaaagaacatcttttactctaactgtggtattgttgctatgggctctattttgacctatttgtccatggttttctctccattaactgttttcatgtactacggtatcccatacttgggtgttaatgcttggattgtttgcattacttacttacaacacactgatccaaaggttcctcacttcagagacaacgaatggaattttcaaagaggtgccgcttgtaccatcgatagatccttcggtactattgtcaaccacttgcaccaccacatcggcgattcccaccaatgtcaccacatgttctctcaaatgccattctacaatgctgtcgaagctactaagtatctaaaggccaagctaggtaagtactacatcttcgacgacactccaattgccaaggctttgtacagaaactggagagaatgtaaattcgtcgaagacgaaggtgatgttgttttctacaagcactaa

SEQ ID NO: 834 - DNA, 1212 bp, Artificial sequence
  Delta-15 Desaturase
atggcccctccacacgtcgtcgacgaacaagttagaagaagaatcgttgttgaagacgagattaagtcaaagaaacaattcgagagaaactacgtcccaatggatttcactatcaaggaaatcagagacgctatccctgctcacttattcatcagagacacaactaagtcaattctacacgttgtcaaagatttggttaccattgccattgttttctactgtgctaccttcatcgaaactttgccatccttggctttgagagttccagcatggatcacctactggattattcaaggtaccgtcatggttggtccatggattttggctcacgaatgtggtcacggtgccttttctaaatacaagacgttcaactccattttgggttgggtcttgcattccgctttgttggttccttatcaggcatgggcaatgtcacactctaagcaccacaagggtactggttccatgactaaggatatcgtcttcattccagctactcgttcctacaaaggtctacctgccctagaaaagcctgctgttgaagaagaagtttctgaacaagaacatcaccaccatgaagaatccatctttgctgaaaccccaatctacactttgggtgccttgttgttcgttttaaccttcggttggccattgtacctaattgttaacttctctggtcacgaagccccacactgggtcaaccacttccaaactgttgctccattgtacgaaccacaccaaagaaagaacatcttttactctaactgtggtattgttgctatgggctctattttgacctatttgtccatggttttctctccattaactgttttcatgtactacggtatcccatacttgggtgttaatgcttggattgtttgcattacttacttacaacacactgatccaaaggttcctcacttcagagacaacgaatggaattttcaaagaggtgccgcttgtaccatcgatagatccttcggtactattgtcaaccacttgcaccaccacatcggcgattcccaccaatgtcaccacatgttctctcaaatgccattctacaatgctgtcgaagctactaagtatctaaaggccaagctaggtaagtactacatcttcgacgacactccaattgccaaggctttgtacagaaactggagagaatgtaaattcgtcgaagacgaaggtgatgttgttttctacaagcactaa

SEQ ID NO: 835 - DNA, 1212 bp, Artificial sequence
  Delta-15 Desaturase
atggcccctccacacgtcgtcgacgaacaagttagaagaagaatcgttgttgaagacgagattaagtcaaagaaacaattcgagagaaactacgtcccaatggatttcactatcaaggaaatcagagacgctatccctgctcacttattcatcagagacacaactaagtcaattctacacgttgtcaaagatttggttaccattgccattgttttctactgtgctaccttcatcgaaactttgccatccttggctttgagagttccagcatggatcacctactggattattcaaggtaccgtcatggttggtccatggattttggctcacgaatgtggtcacggtgccttttctgaatccaagtggttcaacaacattatgggttgggtcttgcattccgctttgttggttccttatcaggcatgggcaatgtcacactctaagcaccacaagggtactggttccatgactaaggatgttgtcttcattccagctactcgttcctacaaaggtctacctgccctagaaaagcctgctgttgaagaagaagtttctgaacaagaacatcaccaccatgaagaatccatctttgctgaaaccccaatctacactttgggtgccttgttgttcgttttaaccttcggttggccattgtacctaattgttaacttctctggtcacgaagccccacactgggtcaaccacttccaaactgttgctccattgtacgaaccacaccaaagaaagaacatcttttactctaactgtggtattgttgctatgggctctattttgacctatttgtccatggttttctctccattaactgttttcatgtactacggtatcccatacttgggtgttaatgcttggattgtttgcattacttacttacaacacactgatccaaaggttcctcacttcagagacaacgaatggaattttcaaagaggtgccgcttgtaccatcgatagatccttcggtactattgtcaaccacttgcaccaccacatcggcgattcccaccaatgtcaccacatgttctctcaaatgccattctacaatgctgtcgaagctactaagtatctaaaggccaagctaggtaagtactacatcttcgacgacactccaattgccaaggctttgtacagaaactggagagaatgtaaattcgtcgaagacgaaggtgatgttgttttctacaagcactaa

SEQ ID NO: 836 - DNA, 1212 bp, Artificial sequence
  Delta-15 Desaturase
atggcccctccacacgtcgtcgacgaacaagttagaagaagaatcgttgttgaagacgagattaagtcaaagaaacaattcgagagaaactacgtcccaatggatttcactatcaaggaaatcagagacgctatccctgctcacttattcatcagagacacaactaagtcaattctacacgttgtcaaagatttggttaccattgccattgttttctactgtgctaccttcatcgaaactttgccatccttggctttgagagttccagcatggatcacctactggattattcaaggtaccgtcatggttggtccatggattttggctcacgaatgtggtcacggtgccttttctgagtacaagtcgttcaacaccattatcggttgggtcttgcattccgctttgttggttccttatcaggcatgggcaatgtcacactctaagcaccacaagggtactggttccatgactaaggatgttgtcttcattccagctactcgttcctacaaaggtctacctgccctagaaaagcctgctgttgaagaagaagtttctgaacaagaacatcaccaccatgaagaatccatctttgctgaaaccccaatctacactttgggtgccttgttgttcgttttaaccttcggttggccattgtacctaattgttaacttctctggtcacgaagccccacactgggtcaaccacttccaaactgttgctccattgtacgaaccacaccaaagaaagaacatcttttactctaactgtggtattgttgctatgggctctattttgacctatttgtccatggttttctctccattaactgttttcatgtactacggtatcccatacttgggtgttaatgcttggattgtttgcattacttacttacaacacactgatccaaaggttcctcacttcagagacaacgaatggaattttcaaagaggtgccgcttgtaccatcgatagatccttcggtactattgtcaaccacttgcaccaccacatcggcgattcccaccaatgtcaccacatgttctctcaaatgccattctacaatgctgtcgaagctactaagtatctaaaggccaagctaggtaagtactacatcttcgacgacactccaattgccaaggctttgtacagaaactggagagaatgtaaattcgtcgaagacgaaggtgatgttgttttctacaagcactaa

SEQ ID NO: 837 - DNA, 1212 bp, Artificial sequence
  Delta-15 Desaturase
atggcccctccacacgtcgtcgacgaacaagttagaagaagaatcgttgttgaagacgagattaagtcaaagaaacaattcgagagaaactacgtcccaatggatttcactatcaaggaaatcagagacgctatccctgctcacttattcatcagagacacaactaagtcaattctacacgttgtcaaagatttggttaccattgccattgttttctactgtgctaccttcatcgaaactttgccatccttggctttgagagttccagcatggatcacctactggattattcaaggtaccgtcatggttggtccatggattttggctcacgaatgtggtcacggtgccttttctgattccaagactatcaacactattttcggttgggtcttgcattccgctttgttggttccttatcaggcatgggcaatgtcacactctaagcaccacaagggtactggttccatgactaaggatgttgtcttcattccagctactagagcgcacagagataccccagacctagaaaagcctgctgttgaagaagaagtttctgaacaagaacatcaccaccatgaagaatccatctttgctgaaaccccaatctacactttgggtgccttgttgttcgttttaaccttcggttggccattgtacctaattgttaacttctctggtcacgaagccccacactgggtcaaccacttccaaactgttgctccattgtacgaaccacaccaaagaaagaacatcttttactctaactgtggtattgttgctatgggctctattttgacctatttgtccatggttttctctccattaactgttttcatgtactacggtatcccatacttgggtgttaatgcttggattgtttgcattacttacttacaacacactgatccaaaggttcctcacttcagagacaacgaatggaattttcaaagaggtgccgcttgtaccatcgatagatccttcggtactattgtcaaccacttgcaccaccacatcggcgattcccaccaatgtcaccacatgttctctcaaatgccattctacaatgctgtcgaagctactaagtatctaaaggccaagctaggtaagtactacatcttcgacgacactccaattgccaaggctttgtacagaaactggagagaatgtaaattcgtcgaagacgaaggtgatgttgttttctacaagcactaa

SEQ ID NO: 838 - DNA, 1212 bp, Artificial sequence
  Delta-15 Desaturase
atggcccctccacacgtcgtcgacgaacaagttagaagaagaatcgttgttgaagacgagattaagtcaaagaaacaattcgagagaaactacgtcccaatggatttcactatcaaggaaatcagagacgctatccctgctcacttattcatcagagacacaactaagtcaattctacacgttgtcaaagatttggttaccattgccattgttttctactgtgctaccttcatcgaaactttgccatccttggctttgagagttccagcatggatcacctactggattattcaaggtaccgtcatggttggtccatggattttggctcacgaatgtggtcacggtgccttttctgattccaagactatcaacactattttcggttgggtcttgcattccgctttgttggttccttatcaggcatgggcaatgtcacactctaagcaccacaagggtactggttccatgactaaggatgttgtcttcattccagctactaaaacggacaaagatgtcccagacctagaaaagcctgctgttgaagaagaagtttctgaacaagaacatcaccaccatgaagaatccatctttgctgaaaccccaatctacactttgggtgccttgttgttcgttttaaccttcggttggccattgtacctaattgttaacttctctggtcacgaagccccacactgggtcaaccacttccaaactgttgctccattgtacgaaccacaccaaagaaagaacatcttttactctaactgtggtattgttgctatgggctctattttgacctatttgtccatggttttctctccattaactgttttcatgtactacggtatcccatacttgggtgttaatgcttggattgtttgcattacttacttacaacacactgatccaaaggttcctcacttcagagacaacgaatggaattttcaaagaggtgccgcttgtaccatcgatagatccttcggtactattgtcaaccacttgcaccaccacatcggcgattcccaccaatgtcaccacatgttctctcaaatgccattctacaatgctgtcgaagctactaagtatctaaaggccaagctaggtaagtactacatcttcgacgacactccaattgccaaggctttgtacagaaactggagagaatgtaaattcgtcgaagacgaaggtgatgttgttttctacaagcactaa

SEQ ID NO: 839 - DNA, 1212 bp, Artificial sequence
  Delta-15 Desaturase
atggcccctccacacgtcgtcgacgaacaagttagaagaagaatcgttgttgaagacgagattaagtcaaagaaacaattcgagagaaactacgtcccaatggatttcactatcaaggaaatcagagacgctatccctgctcacttattcatcagagacacaactaagtcaattctacacgttgtcaaagatttggttaccattgccattgttttctactgtgctaccttcatcgaaactttgccatccttggctttgagagttccagcatggatcacctactggattattcaaggtaccgtcatggttggtccatggattttggctcacgaatgtggtcacggtgccttttctgattccaagactatcaacactattttcggttgggtcttgcattccgctttgttggttccttatcaggcatgggcaatgtcacactctaagcaccacaagggtactggttccatgactaaggatgttgtcttcattccagctactagtgcgttcaaaagtgtccgaaccctagaaaagcctgctgttgaagaagaagtttctgaacaagaacatcaccaccatgaagaatccatctttgctgaaaccccaatctacactttgggtgccttgttgttcgttttaaccttcggttggccattgtacctaattgttaacttctctggtcacgaagccccacactgggtcaaccacttccaaactgttgctccattgtacgaaccacaccaaagaaagaacatcttttactctaactgtggtattgttgctatgggctctattttgacctatttgtccatggttttctctccattaactgttttcatgtactacggtatcccatacttgggtgttaatgcttggattgtttgcattacttacttacaacacactgatccaaaggttcctcacttcagagacaacgaatggaattttcaaagaggtgccgcttgtaccatcgatagatccttcggtactattgtcaaccacttgcaccaccacatcggcgattcccaccaatgtcaccacatgttctctcaaatgccattctacaatgctgtcgaagctactaagtatctaaaggccaagctaggtaagtactacatcttcgacgacactccaattgccaaggctttgtacagaaactggagagaatgtaaattcgtcgaagacgaaggtgatgttgttttctacaagcactaa

SEQ ID NO: 840 - DNA, 1212 bp, Artificial sequence
  Delta-15 Desaturase
atggcccctccacacgtcgtcgacgaacaagttagaagaagaatcgttgttgaagacgagattaagtcaaagaaacaattcgagagaaactacgtcccaatggatttcactatcaaggaaatcagagacgctatccctgctcacttattcatcagagacacaactaagtcaattctacacgttgtcaaagatttggttaccattgccattgttttctactgtgctaccttcatcgaaactttgccatccttggctttgagagttccagcatggatcacctactggattattcaaggtaccgtcatggttggtccatggattttggctcacgaatgtggtcacggtgccttttctgattccaagactatcaacactattttcggttgggtcttgcattccgctttgttggttccttatcaggcatgggcaatgtcacactctaagcaccacaagggtactggttccatgactaaggatgttgtcttcattccagctactcgttcctacaaaggtctacctgcccgacacaatctttacatgtacgaagaagtttctgaacaagaacatcaccaccatgaagaatccatctttgctgaaaccccaatctacactttgggtgccttgttgttcgttttaaccttcggttggccattgtacctaattgttaacttctctggtcacgaagccccacactgggtcaaccacttccaaactgttgctccattgtacgaaccacaccaaagaaagaacatcttttactctaactgtggtattgttgctatgggctctattttgacctatttgtccatggttttctctccattaactgttttcatgtactacggtatcccatacttgggtgttaatgcttggattgtttgcattacttacttacaacacactgatccaaaggttcctcacttcagagacaacgaatggaattttcaaagaggtgccgcttgtaccatcgatagatccttcggtactattgtcaaccacttgcaccaccacatcggcgattcccaccaatgtcaccacatgttctctcaaatgccattctacaatgctgtcgaagctactaagtatctaaaggccaagctaggtaagtactacatcttcgacgacactccaattgccaaggctttgtacagaaactggagagaatgtaaattcgtcgaagacgaaggtgatgttgttttctacaagcactaa

SEQ ID NO: 841 - DNA, 1211 bp, Artificial sequence
  Delta-15 Desaturase
atggcccctccacacgtcgtcgacgaacaagttagaagaagaatcgttgttgaagacgagattaagtcaaagaaacaattcgagagaaactacgtcccaatggatttcactatcaaggaaatcagagacgctatccctgctcacttattcatcagagacacaactaagtcaattctacacgttgtcaaagatttggttaccattgccattgttttctactgtgctaccttcatcgaaactttgccatccttggctttgagagttccagcatggatcacctactggattattcaaggtaccgtcatggttggtccatggattttggctcacgaatgtggtcacggtgccttttctaaacacacgacgttcaacacattatcggttgggtcttgcattccgctttgttggttccttatcaggcatgggcaatgtcacactctaagcaccacaagggtactggttccatgactaaggatgttgtcttcattccagctactcgttcctacaaaggtctacctgccctagaaaagcctgctgttgaagaagaagtttctgaacaagaacatcaccaccatgaagaatccatctttgctgaaaccccaatctacactttgggtgccttgttgttcgttttaaccttcggttggccattgtacctaattgttaacttctctggtcacgaagccccacactgggtcaaccacttccaaactgttgctccattgtacgaaccacaccaaagaaagaacatcttttactctaactgtggtattgttgctatgggctctattttgacctatttgtccatggttttctctccattaactgttttcatgtactacggtatcccatacttgggtgttaatgcttggattgtttgcattacttacttacaacacactgatccaaaggttcctcacttcagagacaacgaatggaattttcaaagaggtgccgcttgtaccatcgatagatccttcggtactattgtcaaccacttgcaccaccacatcggcgattcccaccaatgtcaccacatgttctctcaaatgccattctacaatgctgtcgaagctactaagtatctaaaggccaagctaggtaagtactacatcttcgacgacactccaattgccaaggctttgtacagaaactggagagaatgtaaattcgtcgaagacgaaggtgatgttgttttctacaagcactaa

SEQ ID NO: 842 - DNA, 1212 bp, Artificial sequence
  Delta-15 Desaturase
atggcccctccacacgtcgtcgacgaacaagttagaagaagaatcgttgttgaagacgagattaagtcaaagaaacaattcgagagaaactacgtcccaatggatttcactatcaaggaaatcagagacgctatccctgctcacttattcatcagagacacaactaagtcaattctacacgttgtcaaagatttggttaccattgccattgttttctactgtgctaccttcatcgaaactttgccatccttggctttgagagttccagcatggatcacctactggattattcaaggtaccgtcatggttggtccatggattttggctcacgaatgtggtcacggtgccttttctaactccaggaggttcaacaacattttgggttgggtcttgcattccgctttgttggttccttatcaggcatgggcaatgtcacactctaagcaccacaagggtactggttccatgactaaggatgttgtcttcattccagctactcgttcctacaaaggtctacctgccctagaaaagcctgctgttgaagaagaagtttctgaacaagaacatcaccaccatgaagaatccatctttgctgaaaccccaatctacactttgggtgccttgttgttcgttttaaccttcggttggccattgtacctaattgttaacttctctggtcacgaagccccacactgggtcaaccacttccaaactgttgctccattgtacgaaccacaccaaagaaagaacatcttttactctaactgtggtattgttgctatgggctctattttgacctatttgtccatggttttctctccattaactgttttcatgtactacggtatcccatacttgggtgttaatgcttggattgtttgcattacttacttacaacacactgatccaaaggttcctcacttcagagacaacgaatggaattttcaaagaggtgccgcttgtaccatcgatagatccttcggtactattgtcaaccacttgcaccaccacatcggcgattcccaccaatgtcaccacatgttctctcaaatgccattctacaatgctgtcgaagctactaagtatctaaaggccaagctaggtaagtactacatcttcgacgacactccaattgccaaggctttgtacagaaactggagagaatgtaaattcgtcgaagacgaaggtgatgttgttttctacaagcactaa

SEQ ID NO: 843 - DNA, 1212 bp, Artificial sequence
  Delta-15 Desaturase
atggcccctccacacgtcgtcgacgaacaagttagaagaagaatcgttgttgaagacgagattaagtcaaagaaacaattcgagagaaactacgtcccaatggatttcactatcaaggaaatcagagacgctatccctgctcacttattcatcagagacacaactaagtcaattctacacgttgtcaaagatttggttaccattgccattgttttctactgtgctaccttcatcgaaactttgccatccttggctttgagagttccagcatggatcacctactggattattcaaggtaccgtcatggttggtccatggattttggctcacgaatgtggtcacggtgccttttctgattccaagactatcaacactattttcggttgggtcttgcattccgctttgttggttccttatcaggcatgggcaatgtcacactctaagcaccacaaggatactggtactatgtcgaaggatgtcgtcttcattccagctactcgttcctacaaaggtctacctgccctagaaaagcctgctgttgaagaagaagtttctgaacaagaacatcaccaccatgaagaatccatctttgctgaaaccccaatctacactttgggtgccttgttgttcgttttaaccttcggttggccattgtacctaattgttaacttctctggtcacgaagccccacactgggtcaaccacttccaaactgttgctccattgtacgaaccacaccaaagaaagaacatcttttactctaactgtggtattgttgctatgggctctattttgacctatttgtccatggttttctctccattaactgttttcatgtactacggtatcccatacttgggtgttaatgcttggattgtttgcattacttacttacaacacactgatccaaaggttcctcacttcagagacaacgaatggaattttcaaagaggtgccgcttgtaccatcgatagatccttcggtactattgtcaaccacttgcaccaccacatcggcgattcccaccaatgtcaccacatgttctctcaaatgccattctacaatgctgtcgaagctactaagtatctaaaggccaagctaggtaagtactacatcttcgacgacactccaattgccaaggctttgtacagaaactggagagaatgtaaattcgtcgaagacgaaggtgatgttgttttctacaagcactaa

SEQ ID NO: 844 - DNA, 1212 bp, Artificial sequence
  Delta-15 Desaturase
atggcccctccacacgtcgtcgacgaacaagttagaagaagaatcgttgttgaagacgagattaagtcaaagaaacaattcgagagaaactacgtcccaatggatttcactatcaaggaaatcagagacgctatccctgctcacttattcatcagagacacaactaagtcaattctacacgttgtcaaagatttggttaccattgccattgttttctactgtgctaccttcatcgaaactttgccatccttggctttgagagttccagcatggatcacctactggattattcaaggtaccgtcatggttggtccatggattttggctcacgaatgtggtcacggtgccttttctgattccaagactatcaacactattttcggttgggtcttgcattccgctttgttggttccttatcaggcatgggcaatgtcacactctaagcaccacaaggttactggtactatggagaaggatctggtcttcattccagctactcgttcctacaaaggtctacctgccctagaaaagcctgctgttgaagaagaagtttctgaacaagaacatcaccaccatgaagaatccatctttgctgaaaccccaatctacactttgggtgccttgttgttcgttttaaccttcggttggccattgtacctaattgttaacttctctggtcacgaagccccacactgggtcaaccacttccaaactgttgctccattgtacgaaccacaccaaagaaagaacatcttttactctaactgtggtattgttgctatgggctctattttgacctatttgtccatggttttctctccattaactgttttcatgtactacggtatcccatacttgggtgttaatgcttggattgtttgcattacttacttacaacacactgatccaaaggttcctcacttcagagacaacgaatggaattttcaaagaggtgccgcttgtaccatcgatagatccttcggtactattgtcaaccacttgcaccaccacatcggcgattcccaccaatgtcaccacatgttctctcaaatgccattctacaatgctgtcgaagctactaagtatctaaaggccaagctaggtaagtactacatcttcgacgacactccaattgccaaggctttgtacagaaactggagagaatgtaaattcgtcgaagacgaaggtgatgttgttttctacaagcactaa

SEQ ID NO: 845 - DNA, 1212 bp, Artificial sequence
  Delta-15 Desaturase
atggcccctccacacgtcgtcgacgaacaagttagaagaagaatcgttgttgaagacgagattaagtcaaagaaacaattcgagagaaactacgtcccaatggatttcactatcaaggaaatcagagacgctatccctgctcacttattcatcagagacacaactaagtcaattctacacgttgtcaaagatttggttaccattgccattgttttctactgtgctaccttcatcgaaactttgccatccttggctttgagagttccagcatggatcacctactggattattcaaggtaccgtcatggttggtccatggattttggctcacgaatgtggtcacggtgccttttctgattccaagactatcaacactattttcggttgggtcttgcattccgctttgttggttccttatcaggcatgggcaatgtcacactctaagcaccacaaggctactggtcgtatgaagaaggatatcgtcttcattccagctactcgttcctacaaaggtctacctgccctagaaaagcctgctgttgaagaagaagtttctgaacaagaacatcaccaccatgaagaatccatctttgctgaaaccccaatctacactttgggtgccttgttgttcgttttaaccttcggttggccattgtacctaattgttaacttctctggtcacgaagccccacactgggtcaaccacttccaaactgttgctccattgtacgaaccacaccaaagaaagaacatcttttactctaactgtggtattgttgctatgggctctattttgacctatttgtccatggttttctctccattaactgttttcatgtactacggtatcccatacttgggtgttaatgcttggattgtttgcattacttacttacaacacactgatccaaaggttcctcacttcagagacaacgaatggaattttcaaagaggtgccgcttgtaccatcgatagatccttcggtactattgtcaaccacttgcaccaccacatcggcgattcccaccaatgtcaccacatgttctctcaaatgccattctacaatgctgtcgaagctactaagtatctaaaggccaagctaggtaagtactacatcttcgacgacactccaattgccaaggctttgtacagaaactggagagaatgtaaattcgtcgaagacgaaggtgatgttgttttctacaagcactaa

SEQ ID NO: 846 - DNA, 1212 bp, Artificial sequence
  Delta-15 Desaturase
atggcccctccacacgtcgtcgacgaacaagttagaagaagaatcgttgttgaagacgagattaagtcaaagaaacaattcgagagaaactacgtcccaatggatttcactatcaaggaaatcagagacgctatccctgctcacttattcatcagagacacaactaagtcaattctacacgttgtcaaagatttggttaccattgccattgttttctactgtgctaccttcatcgaaactttgccatccttggctttgagagttccagcatggatcacctactggattattcaaggtaccgtcatggttggtccatggattttggctcacgaatgtggtcacggtgccttttctaaccccaggacgttcaacaccattatcggttgggtcttgcattccgctttgttggttccttatcaggcatgggcaatgtcacactctaagcaccacaaggatactggtactatggcgaaggatttggtcttcattccagctactcgttcctacaaaggtctacctgccctagaaaagcctgctgttgaagaagaagtttctgaacaagaacatcaccaccatgaagaatccatctttgctgaaaccccaatctacactttgggtgccttgttgttcgttttaaccttcggttggccattgtacctaattgttaacttctctggtcacgaagccccacactgggtcaaccacttccaaactgttgctccattgtacgaaccacaccaaagaaagaacatcttttactctaactgtggtattgttgctatgggctctattttgacctatttgtccatggttttctctccattaactgttttcatgtactacggtatcccatacttgggtgttaatgcttggattgtttgcattacttacttacaacacactgatccaaaggttcctcacttcagagacaacgaatggaattttcaaagaggtgccgcttgtaccatcgatagatccttcggtactattgtcaaccacttgcaccaccacatcggcgattcccaccaatgtcaccacatgttctctcaaatgccattctacaatgctgtcgaagctactaagtatctaaaggccaagctaggtaagtactacatcttcgacgacactccaattgccaaggctttgtacagaaactggagagaatgtaaattcgtcgaagacgaaggtgatgttgttttctacaagcactaa

SEQ ID NO: 847 - DNA, 1212 bp, Artificial sequence
  Delta-15 Desaturase
atggcccctccacacgtcgtcgacgaacaagttagaagaagaatcgttgttgaagacgagattaagtcaaagaaacaattcgagagaaactacgtcccaatggatttcactatcaaggaaatcagagacgctatccctgctcacttattcatcagagacacaactaagtcaattctacacgttgtcaaagatttggttaccattgccattgttttctactgtgctaccttcatcgaaactttgccatccttggctttgagagttccagcatggatcacctactggattattcaaggtaccgtcatggttggtccatggattttggctcacgaatgtggtcacggtgccttttctaaatacaggacgttcaacaccattttcggttgggtcttgcattccgctttgttggttccttatcaggcatgggcaatgtcacactctaagcaccacaagtatactggtactatgtcgaaggatatcgtcttcattccagctactcgttcctacaaaggtctacctgccctagaaaagcctgctgttgaagaagaagtttctgaacaagaacatcaccaccatgaagaatccatctttgctgaaaccccaatctacactttgggtgccttgttgttcgttttaaccttcggttggccattgtacctaattgttaacttctctggtcacgaagccccacactgggtcaaccacttccaaactgttgctccattgtacgaaccacaccaaagaaagaacatcttttactctaactgtggtattgttgctatgggctctattttgacctatttgtccatggttttctctccattaactgttttcatgtactacggtatcccatacttgggtgttaatgcttggattgtttgcattacttacttacaacacactgatccaaaggttcctcacttcagagacaacgaatggaattttcaaagaggtgccgcttgtaccatcgatagatccttcggtactattgtcaaccacttgcaccaccacatcggcgattcccaccaatgtcaccacatgttctctcaaatgccattctacaatgctgtcgaagctactaagtatctaaaggccaagctaggtaagtactacatcttcgacgacactccaattgccaaggctttgtacagaaactggagagaatgtaaattcgtcgaagacgaaggtgatgttgttttctacaagcactaa

SEQ ID NO: 848 - DNA, 1212 bp, Artificial sequence
  Delta-15 Desaturase
atggcccctccacacgtcgtcgacgaacaagttagaagaagaatcgttgttgaagacgagattaagtcaaagaaacaattcgagagaaactacgtcccaatggatttcactatcaaggaaatcagagacgctatccctgctcacttattcatcagagacacaactaagtcaattctacacgttgtcaaagatttggttaccattgccattgttttctactgtgctaccttcatcgaaactttgccatccttggctttgagagttccagcatggatcacctactggattattcaaggtaccgtcatggttggtccatggattttggctcacgaatgtggtcacggtgccttttctgatcccaagaggatcaactccattatcagttgggtcttgcattccgctttgttggttccttatcaggcatgggcaatgtcacactctaagcaccacaagtttactggtcgtatgaagaaggatgtcgtcttcattccagctactcgttcctacaaaggtctacctgccctagaaaagcctgctgttgaagaagaagtttctgaacaagaacatcaccaccatgaagaatccatctttgctgaaaccccaatctacactttgggtgccttgttgttcgttttaaccttcggttggccattgtacctaattgttaacttctctggtcacgaagccccacactgggtcaaccacttccaaactgttgctccattgtacgaaccacaccaaagaaagaacatcttttactctaactgtggtattgttgctatgggctctattttgacctatttgtccatggttttctctccattaactgttttcatgtactacggtatcccatacttgggtgttaatgcttggattgtttgcattacttacttacaacacactgatccaaaggttcctcacttcagagacaacgaatggaattttcaaagaggtgccgcttgtaccatcgatagatccttcggtactattgtcaaccacttgcaccaccacatcggcgattcccaccaatgtcaccacatgttctctcaaatgccattctacaatgctgtcgaagctactaagtatctaaaggccaagctaggtaagtactacatcttcgacgacactccaattgccaaggctttgtacagaaactggagagaatgtaaattcgtcgaagacgaaggtgatgttgttttctacaagcactaa

SEQ ID NO: 849 - DNA, 1212 bp, Artificial sequence
  Delta-15 Desaturase
atggcccctccacacgtcgtcgacgaacaagttagaagaagaatcgttgttgaagacgagattaagtcaaagaaacaattcgagagaaactacgtcccaatggatttcactatcaaggaaatcagagacgctatccctgctcacttattcatcagagacacaactaagtcaattctacacgttgtcaaagatttggttaccattgccattgttttctactgtgctaccttcatcgaaactttgccatccttggctttgagagttccagcatggatcacctactggattattcaaggtaccgtcatggttggtccatggattttggctcacgaatgtggtcacggtgccttttctgattccaagactatcaacactattttcggttgggtcttgcattccgctttgttggttccttatcaggcatgggcaatgtcacactctaagcaccacaagtctactggtcctatggagaaggatatggtcttcattccagctactcgttcctacaaaggtctacctgccctagaaaagcctgctgttgaagaagaagtttctgaacaagaacatcaccaccatgaagaatccatctttgctgaaaccccaatctacactttgggtgccttgttgttcgttttaaccttcggttggccattgtacctaattgttaacttctctggtcacgaagccccacactgggtcaaccacttccaaactgttgctccattgtacgaaccacaccaaagaaagaacatcttttactctaactgtggtattgttgctatgggctctattttgacctatttgtccatggttttctctccattaactgttttcatgtactacggtatcccatacttgggtgttaatgcttggattgtttgcattacttacttacaacacactgatccaaaggttcctcacttcagagacaacgaatggaattttcaaagaggtgccgcttgtaccatcgatagatccttcggtactattgtcaaccacttgcaccaccacatcggcgattcccaccaatgtcaccacatgttctctcaaatgccattctacaatgctgtcgaagctactaagtatctaaaggccaagctaggtaagtactacatcttcgacgacactccaattgccaaggctttgtacagaaactggagagaatgtaaattcgtcgaagacgaaggtgatgttgttttctacaagcactaa

SEQ ID NO: 850 - DNA, 1212 bp, Artificial sequence
  Delta-15 Desaturase
atggcccctccacacgtcgtcgacgaacaagttagaagaagaatcgttgttgaagacgagattaagtcaaagaaacaattcgagagaaactacgtcccaatggatttcactatcaaggaaatcagagacgctatccctgctcacttattcatcagagacacaactaagtcaattctacacgttgtcaaagatttggttaccattgccattgttttctactgtgctaccttcatcgaaactttgccatccttggctttgagagttccagcatggatcacctactggattattcaaggtaccgtcatggttggtccatggattttggctcacgaatgtggtcacggtgccttttctgattccaagactatcaacactattttcggttgggtcttgcattccgctttgttggttccttatcaggcatgggcaatgtcacactctaagcaccacaaggttactggtcctatgtcgaaggatatggtcttcattccagctactcgttcctacaaaggtctacctgccctagaaaagcctgctgttgaagaagaagtttctgaacaagaacatcaccaccatgaagaatccatctttgctgaaaccccaatctacactttgggtgccttgttgttcgttttaaccttcggttggccattgtacctaattgttaacttctctggtcacgaagccccacactgggtcaaccacttccaaactgttgctccattgtacgaaccacaccaaagaaagaacatcttttactctaactgtggtattgttgctatgggctctattttgacctatttgtccatggttttctctccattaactgttttcatgtactacggtatcccatacttgggtgttaatgcttggattgtttgcattacttacttacaacacactgatccaaaggttcctcacttcagagacaacgaatggaattttcaaagaggtgccgcttgtaccatcgatagatccttcggtactattgtcaaccacttgcaccaccacatcggcgattcccaccaatgtcaccacatgttctctcaaatgccattctacaatgctgtcgaagctactaagtatctaaaggccaagctaggtaagtactacatcttcgacgacactccaattgccaaggctttgtacagaaactggagagaatgtaaattcgtcgaagacgaaggtgatgttgttttctacaagcactaa

SEQ ID NO: 851 - DNA, 1212 bp, Artificial sequence
  Delta-15 Desaturase
atggcccctccacacgtcgtcgacgaacaagttagaagaagaatcgttgttgaagacgagattaagtcaaagaaacaattcgagagaaactacgtcccaatggatttcactatcaaggaaatcagagacgctatccctgctcacttattcatcagagacacaactaagtcaattctacacgttgtcaaagatttggttaccattgccattgttttctactgtgctaccttcatcgaaactttgccatccttggctttgagagttccagcatggatcacctactggattattcaaggtaccgtcatggttggtccatggattttggctcacgaatgtggtcacggtgccttttctgattccaagactatcaacactattttcggttgggtcttgcattccgctttgttggttccttatcaggcatgggcaatgtcacactctaagcaccacaagtatactggtgctatgacgaaggatttggtcttcattccagctactcgttcctacaaaggtctacctgccctagaaaagcctgctgttgaagaagaagtttctgaacaagaacatcaccaccatgaagaatccatctttgctgaaaccccaatctacactttgggtgccttgttgttcgttttaaccttcggttggccattgtacctaattgttaacttctctggtcacgaagccccacactgggtcaaccacttccaaactgttgctccattgtacgaaccacaccaaagaaagaacatcttttactctaactgtggtattgttgctatgggctctattttgacctatttgtccatggttttctctccattaactgttttcatgtactacggtatcccatacttgggtgttaatgcttggattgtttgcattacttacttacaacacactgatccaaaggttcctcacttcagagacaacgaatggaattttcaaagaggtgccgcttgtaccatcgatagatccttcggtactattgtcaaccacttgcaccaccacatcggcgattcccaccaatgtcaccacatgttctctcaaatgccattctacaatgctgtcgaagctactaagtatctaaaggccaagctaggtaagtactacatcttcgacgacactccaattgccaaggctttgtacagaaactggagagaatgtaaattcgtcgaagacgaaggtgatgttgttttctacaagcactaa

SEQ ID NO: 852 - DNA, 1212 bp, Artificial sequence
  Delta-15 Desaturase
atggcccctccacacgtcgtcgacgaacaagttagaagaagaatcgttgttgaagacgagattaagtcaaagaaacaattcgagagaaactacgtcccaatggatttcactatcaaggaaatcagagacgctatccctgctcacttattcatcagagacacaactaagtcaattctacacgttgtcaaagatttggttaccattgccattgttttctactgtgctaccttcatcgaaactttgccatccttggctttgagagttccagcatggatcacctactggattattcaaggtaccgtcatggttggtccatggattttggctcacgaatgtggtcacggtgccttttctgattccaagactatcaacactattttcggttgggtcttgcattccgctttgttggttccttatcaggcatgggcaatgtcacactctaagcaccacaaggatactggtcctatgacgaaggatatggtcttcattccagctactcgttcctacaaaggtctacctgccctagaaaagcctgctgttgaagaagaagtttctgaacaagaacatcaccaccatgaagaatccatctttgctgaaaccccaatctacactttgggtgccttgttgttcgttttaaccttcggttggccattgtacctaattgttaacttctctggtcacgaagccccacactgggtcaaccacttccaaactgttgctccattgtacgaaccacaccaaagaaagaacatcttttactctaactgtggtattgttgctatgggctctattttgacctatttgtccatggttttctctccattaactgttttcatgtactacggtatcccatacttgggtgttaatgcttggattgtttgcattacttacttacaacacactgatccaaaggttcctcacttcagagacaacgaatggaattttcaaagaggtgccgcttgtaccatcgatagatccttcggtactattgtcaaccacttgcaccaccacatctgcgattcccaccaatgtcaccacatgttctctcaaatgccattctacaatgctgtcgaagctactaagtatctaaaggccaagctaggtaagtactacatcttcgacgacactccaattgccaaggctttgtacagaaactggagagaatgtaaattcgtcgaagacgaaggtgatgttgttttctacaagcactaa

SEQ ID NO: 853 - DNA, 1212 bp, Artificial sequence
  Delta-15 Desaturase
atggcccctccacacgtcgtcgacgaacaagttagaagaagaatcgttgttgaagacgagattaagtcaaagaaacaattcgagagaaactacgtcccaatggatttcactatcaaggaaatcagagacgctatccctgctcacttattcatcagagacacaactaagtcaattctacacgttgtcaaagatttggttaccattgccattgttttctactgtgctaccttcatcgaaactttgccatccttggctttgagagttccagcatggatcacctactggattattcaaggtaccgtcatggttggtccatggattttggctcacgaatgtggtcacggtgccttttctgattccaagactatcaacactattttcggttgggtcttgcattccgctttgttggttccttatcaggcatgggcaatgtcacactctaagcaccacaaggttactggtagtatgactaaggatgttgtcttcattccagctactcgttcctacaaaggtctacctgccctagaaaagcctgctgttgaagaagaagtttctgaacaagaacatcaccaccatgaagaatccatctttgctgaaaccccaatctacactttgggtgccttgttgttcgttttaaccttcggttggccattgtacctaattgttaacttctctggtcacgaagccccacactgggtcaaccacttccaaactgttgctccattgtacgaaccacaccaaagaaagaacatcttttactctaactgtggtattgttgctatgggctctattttgacctatttgtccatggttttctctccattaactgttttcatgtactacggtatcccatacttgggtgttaatgcttggattgtttgcattacttacttacaacacactgatccaaaggttcctcacttcagagacaacgaatggaattttcaaagaggtgccgcttgtaccatcgatagatccttcggtactattgtcaaccacttgcaccaccacatcggcgattcccaccaatgtcaccacatgttctctcaaatgccattctacaatgctgtcgaagctactaagtatctaaaggccaagctaggtaagtactacatcttcgacgacactccaattgccaaggctttgtacagaaactggagagaatgtaaattcgtcgaagacgaaggtgatgttgttttctacaagcactaa

SEQ ID NO: 854 - DNA, 1212 bp, Artificial sequence
  Delta-15 Desaturase
atggcccctccacacgtcgtcgacgaacaagttagaagaagaatcgttgttgaagacgagattaagtcaaagaaacaattcgagagaaactacgtcccaatggatttcactatcaaggaaatcagagacgctatccctgctcacttattcatcagagacacaactaagtcaattctacacgttgtcaaagatttggttaccattgccattgttttctactgtgctaccttcatcgaaactttgccatccttggctttgagagttccagcatggatcacctactggattattcaaggtaccgtcatggttggtccatggattttggctcacgaatgtggtcacggtgccttttctaattccaagtcgttcaactccattttcggttgggtcttgcattccgctttgttggttccttatcaggcatgggcaatgtcacactctaagcaccacaagtttactggtcctatgaagaaggatatcgtcttcattccagctactcgttcctacaaaggtctacctgccctagaaaagcctgctgttgaagaagaagtttctgaacaagaacatcaccaccatgaagaatccatctttgctgaaaccccaatctacactttgggtgccttgttgttcgttttaaccttcggttggccattgtacctaattgttaacttctctggtcacgaagccccacactgggtcaaccacttccaaactgttgctccattgtacgaaccacaccaaagaaagaacatcttttactctaactgtggtattgttgctatgggctctattttgacctatttgtccatggttttctctccattaactgttttcatgtactacggtatcccatacttgggtgttaatgcttggattgtttgcattacttacttacaacacactgatccaaaggttcctcacttcagagacaacgaatggaattttcaaagaggtgccgcttgtaccatcgatagatccttcggtactattgtcaaccacttgcaccaccacatcggcgattcccaccaatgtcaccacatgttctctcaaatgccattctacaatgctgtcgaagctactaagtatctaaaggccaagctaggtaagtactacatcttcgacgacactccaattgccaaggctttgtacagaaactggagagaatgtaaattcgtcgaagacgaaggtgatgttgttttctacaagcactaa

SEQ ID NO: 855 - DNA, 1212 bp, Artificial sequence
  Delta-15 Desaturase
atggcccctccacacgtcgtcgacgaacaagttagaagaagaatcgttgttgaagacgagattaagtcaaagaaacaattcgagagaaactacgtcccaatggatttcactatcaaggaaatcagagacgctatccctgctcacttattcatcagagacacaactaagtcaattctacacgttgtcaaagatttggttaccattgccattgttttctactgtgctaccttcatcgaaactttgccatccttggctttgagagttccagcatggatcacctactggattattcaaggtaccgtcatggttggtccatggattttggctcacgaatgtggtcacggtgccttttctgattccaagtggatcaacaccattatcggttgggtcttgcattccgctttgttggttccttatcaggcatgggcaatgtcacactctaagcaccacaagtctactggtcctatgtcgaaggatgtcgtcttcattccagctactcgttcctacaaaggtctacctgccctagaaaagcctgctgttgaagaagaagtttctgaacaagaacatcaccaccatgaagaatccatctttgctgaaaccccaatctacactttgggtgccttgttgttcgttttaaccttcggttggccattgtacctaattgttaacttctctggtcacgaagccccacactgggtcaaccacttccaaactgttgctccattgtacgaaccacaccaaagaaagaacatcttttactctaactgtggtattgttgctatgggctctattttgacctatttgtccatggttttctctccattaactgttttcatgtactacggtatcccatacttgggtgttaatgcttggattgtttgcattacttacttacaacacactgatccaaaggttcctcacttcagagacaacgaatggaattttcaaagaggtgccgcttgtaccatcgatagatccttcggtactattgtcaaccacttgcaccaccacatcggcgattcccaccaatgtcaccacatgttctctcaaatgccattctacaatgctgtcgaagctactaagtatctaaaggccaagctaggtaagtactacatcttcgacgacactccaattgccaaggctttgtacagaaactggagagaatgtaaattcgtcgaagacgaaggtgatgttgttttctacaagcactaa

SEQ ID NO: 856 - DNA, 1212 bp, Artificial sequence
  Delta-15 Desaturase
atggcccctccacacgtcgtcgacgaacaagttagaagaagaatcgttgttgaagacgagattaagtcaaagaaacaattcgagagaaactacgtcccaatggatttcactatcaaggaaatcagagacgctatccctgctcacttattcatcagagacacaactaagtcaattctacacgttgtcaaagatttggttaccattgccattgttttctactgtgctaccttcatcgaaactttgccatccttggctttgagagttccagcatggatcacctactggattattcaaggtaccgtcatggttggtccatggattttggctcacgaatgtggtcacggtgccttttctgaacccaggtcgatcaactccattatgggttgggtcttgcattccgctttgttggttccttatcaggcatgggcaatgtcacactctaagcaccacaaggctactggtgctatgacgaaggatatggtcttcattccagctactcgttcctacaaaggtctacctgccctagaaaagcctgctgttgaagaagaagtttctgaacaagaacatcaccaccatgaagaatccatctttgctgaaaccccaatctacactttgggtgccttgttgttcgttttaaccttcggttggccattgtacctaattgttaacttctctggtcacgaagccccacactgggtcaaccacttccaaactgttgctccattgtacgaaccacaccaaagaaagaacatcttttactctaactgtggtattgttgctatgggctctattttgacctatttgtccatggttttctctccattaactgttttcatgtactacggtatcccatacttgggtgttaatgcttggattgtttgcattacttacttacaacacactgatccaaaggttcctcacttcagagacaacgaatggaattttcaaagaggtgccgcttgtaccatcgatagatccttcggtactattgtcaaccacttgcaccaccacatcggcgattcccaccaatgtcaccacatgttctctcaaatgccattctacaatgctgtcgaagctactaagtatctaaaggccaagctaggtaagtactacatcttcgacgacactccaattgccaaggctttgtacagaaactggagagaatgtaaattcgtcgaagacgaaggtgatgttgttttctacaagcactaa

SEQ ID NO: 857 - DNA, 1212 bp, Artificial sequence
  Delta-15 Desaturase
atggcccctccacacgtcgtcgacgaacaagttagaagaagaatcgttgttgaagacgagattaagtcaaagaaacaattcgagagaaactacgtcccaatggatttcactatcaaggaaatcagagacgctatccctgctcacttattcatcagagacacaactaagtcaattctacacgttgtcaaagatttggttaccattgccattgttttctactgtgctaccttcatcgaaactttgccatccttggctttgagagttccagcatggatcacctactggattattcaaggtaccgtcatggttggtccatggattttggctcacgaatgtggtcacggtgccttttctgatcccaggacgttcaacaacattatcggttgggtcttgcattccgctttgttggttccttatcaggcatgggcaatgtcacactctaagcaccacaaggttactggtgctatggcgaaggatatggtcttcattccagctactcgttcctacaaaggtctacctgccctagaaaagcctgctgttgaagaagaagtttctgaacaagaacatcaccaccatgaagaatccatctttgctgaaaccccaatctacactttgggtgccttgttgttcgttttaaccttcggttggccattgtacctaattgttaacttctctggtcacgaagccccacactgggtcaaccacttccaaactgttgctccattgtacgaaccacaccaaagaaagaacatcttttactctaactgtggtattgttgctatgggctctattttgacctatttgtccatggttttctctccattaactgttttcatgtactacggtatcccatacttgggtgttaatgcttggattgtttgcattacttacttacaacacactgatccaaaggttcctcacttcagagacaacgaatggaattttcaaagaggtgccgcttgtaccatcgatagatccttcggtactattgtcaaccacttgcaccaccacatcggcgattcccaccaatgtcaccacatgttctctcaaatgccattctacaatgctgtcgaagctactaagtatctaaaggccaagctaggtaagtactacatcttcgacgacactccaattgccaaggctttgtacagaaactggagagaatgtaaattcgtcgaagacgaaggtgatgttgttttctacaagcactaa

SEQ ID NO: 858 - DNA, 1212 bp, Artificial sequence
  Delta-15 Desaturase
atggcccctccacacgtcgtcgacgaacaagttagaagaagaatcgttgttgaagacgagattaagtcaaagaaacaattcgagagaaactacgtcccaatggatttcactatcaaggaaatcagagacgctatccctgctcacttattcatcagagacacaactaagtcaattctacacgttgtcaaagatttggttaccattgccattgttttctactgtgctaccttcatcgaaactttgccatccttggctttgagagttccagcatggatcacctactggattattcaaggtaccgtcatggttggtccatggattttggctcacgaatgtggtcacggtgccttttctaaacacaggtggttcaacaccattttcggttgggtcttgcattccgctttgttggttccttatcaggcatgggcaatgtcacactctaagcaccacaaggttactggttccatgactaaggatgttgtcttcattccagctactcgttcctacaaaggtctacctgccctagaaaagcctgctgttgaagaagaagtttctgaacaagaacatcaccaccatgaagaatccatctttgctgaaaccccaatctacactttgggtgccttgttgttcgttttaaccttcggttggccattgtacctaattgttaacttctctggtcacgaagccccacactgggtcaaccacttccaaactgttgctccattgtacgaaccacaccaaagaaagaacatcttttactctaactgtggtattgttgctatgggctctattttgacctatttgtccatggttttctctccattaactgttttcatgtactacggtatcccatacttgggtgttaatgcttggattgtttgcattacttacttacaacacactgatccaaaggttcctcacttcagagacaacgaatggaattttcaaagaggtgccgcttgtaccatcgatagatccttcggtactattgtcaaccacttgcaccaccacatcggcgattcccaccaatgtcaccacatgttctctcaaatgccattctacaatgctgtcgaagctactaagtatctaaaggccaagctaggtaagtactacatcttcgacgacactccaattgccaaggctttgtacagaaactggagagaatgtaaattcgtcgaagacgaaggtgatgttgttttctacaagcactaa

SEQ ID NO: 859 - DNA, 1212 bp, Artificial sequence
  Delta-15 Desaturase
atggcccctccacacgtcgtcgacgaacaagttagaagaagaatcgttgttgaagacgagattaagtcaaagaaacaattcgagagaaactacgtcccaatggatttcactatcaaggaaatcagagacgctatccctgctcacttattcatcagagacacaactaagtcaattctacacgttgtcaaagatttggttaccattgccattgttttctactgtgctaccttcatcgaaactttgccatccttggctttgagagttccagcatggatcacctactggattattcaaggtaccgtcatggttggtccatggattttggctcacgaatgtggtcacggtgccttttctaatcacaagtcgttcaacaccattttgggttgggtcttgcattccgctttgttggttccttatcaggcatgggcaatgtcacactctaagcaccacaagggtactggtggtatgaagaaggatttcgtcttcattccagctactcgttcctacaaaggtctacctgccctagaaaagcctgctgttgaagaagaagtttctgaacaagaacatcaccaccatgaagaatccatctttgctgaaaccccaatctacactttgggtgccttgttgttcgttttaaccttcggttggccattgtacctaattgttaacttctctggtcacgaagccccacactgggtcaaccacttccaaactgttgctccattgtacgaaccacaccaaagaaagaacatcttttactctaactgtggtattgttgctatgggctctattttgacctatttgtccatggttttctctccattaactgttttcatgtactacggtatcccatacttgggtgttaatgcttggattgtttgcattacttacttacaacacactgatccaaaggttcctcacttcagagacaacgaatggaattttcaaagaggtgccgcttgtaccatcgatagatccttcggtactattgtcaaccacttgcaccaccacatcggcgattcccaccaatgtcaccacatgttctctcaaatgccattctacaatgctgtcgaagctactaagtatctaaaggccaagctaggtaagtactacatcttcgacgacactccaattgccaaggctttgtacagaaactggagagaatgtaaattcgtcgaagacgaaggtgatgttgttttctacaagcactaa

SEQ ID NO: 860 - DNA, 1212 bp, Artificial sequence
  Delta-15 Desaturase
atggcccctccacacgtcgtcgacgaacaagttagaagaagaatcgttgttgaagacgagattaagtcaaagaaacaattcgagagaaactacgtcccaatggatttcactatcaaggaaatcagagacgctatccctgctcacttattcatcagagacacaactaagtcaattctacacgttgtcaaagatttggttaccattgccattgttttctactgtgctaccttcatcgaaactttgccatccttggctttgagagttccagcatggatcacctactggattattcaaggtaccgtcatggttggtccatggattttggctcacgaatgtggtcacggtgccttttctgaacacacgacgatcaacaccattttcggttgggtcttgcattccgctttgttggttccttatcaggcatgggcaatgtcacactctaagcaccacaaggttactggtgatatgtcgaaggatgtggtcttcattccagctactcgttcctacaaaggtctacctgccctagaaaagcctgctgttgaagaagaagtttctgaacaagaacatcaccaccatgaagaatccatctttgctgaaaccccaatctacactttgggtgccttgttgttcgttttaaccttcggttggccattgtacctaattgttaacttctctggtcacgaagccccacactgggtcaaccacttccaaactgttgctccattgtacgaaccacaccaaagaaagaacatcttttactctaactgtggtattgttgctatgggctctattttgacctatttgtccatggttttctctccattaactgttttcatgtactacggtatcccatacttgggtgttaatgcttggattgtttgcattacttacttacaacacactgatccaaaggttcctcacttcagagacaacgaatggaattttcaaagaggtgccgcttgtaccatcgatagatccttcggtactattgtcaaccacttgcaccaccacatcggcgattcccaccaatgtcaccacatgttctctcaaatgccattctacaatgctgtcgaagctactaagtatctaaaggccaagctaggtaagtactacatcttcgacgacactccaattgccaaggctttgtacagaaactggagagaatgtaaattcgtcgaagacgaaggtgatgttgttttctacaagcactaa

SEQ ID NO: 861 - DNA, 1212 bp, Artificial sequence
  Delta-15 Desaturase
atggcccctccacacgtcgtcgacgaacaagttagaagaagaatcgttgttgaagacgagattaagtcaaagaaacaattcgagagaaactacgtcccaatggatttcactatcaaggaaatcagagacgctatccctgctcacttattcatcagagacacaactaagtcaattctacacgttgtcaaagatttggttaccattgccattgttttctactgtgctaccttcatcgaaactttgccatccttggctttgagagttccagcatggatcacctactggattattcaaggtaccgtcatggttggtccatggattttggctcacgaatgtggtcacggtgccttttctcaacacacgaggatcaactacattttgggttgggtcttgcattccgctttgttggttccttatcaggcatgggcaatgtcacactctaagcaccacaaggctactggtactatgtcgaaggatttcgtcttcattccagctactcgttcctacaaaggtctacctgccctagaaaagcctgctgttgaagaagaagtttctgaacaagaacatcaccaccatgaagaatccatctttgctgaaaccccaatctacactttgggtgccttgttgttcgttttaaccttcggttggccattgtacctaattgttaacttctctggtcacgaagccccacactgggtcaaccacttccaaactgttgctccattgtacgaaccacaccaaagaaagaacatcttttactctaactgtggtattgttgctatgggctctattttgacctatttgtccatggttttctctccattaactgttttcatgtactacggtatcccatacttgggtgttaatgcttggattgtttgcattacttacttacaacacactgatccaaaggttcctcacttcagagacaacgaatggaattttcaaagaggtgccgcttgtaccatcgatagatccttcggtactattgtcaaccacttgcaccaccacatcggcgattcccaccaatgtcaccacatgttctctcaaatgccattctacaatgctgtcgaagctactaagtatctaaaggccaagctaggtaagtactacatcttcgacgacactccaattgccaaggctttgtacagaaactggagagaatgtaaattcgtcgaagacgaaggtgatgttgttttctacaagcactaa

SEQ ID NO: 862 - DNA, 1212 bp, Artificial sequence
  Delta-15 Desaturase
atggcccctccacacgtcgtcgacgaacaagttagaagaagaatcgttgttgaagacgagattaagtcaaagaaacaattcgagagaaactacgtcccaatggatttcactatcaaggaaatcagagacgctatccctgctcacttattcatcagagacacaactaagtcaattctacacgttgtcaaagatttggttaccattgccattgttttctactgtgctaccttcatcgaaactttgccatccttggctttgagagttccagcatggatcacctactggattattcaaggtaccgtcatggttggtccatggattttggctcacgaatgtggtcacggtgccttttctaaccccaagaggttcaactacattatgggttgggtcttgcattccgctttgttggttccttatcaggcatgggcaatgtcacactctaagcaccacaagtctactggtcgtatgtcgaaggatgtggtcttcattccagctactcgttcctacaaaggtctacctgccctagaaaagcctgctgttgaagaagaagtttctgaacaagaacatcaccaccatgaagaatccatctttgctgaaaccccaatctacactttgggtgccttgttgttcgttttaaccttcggttggccattgtacctaattgttaacttctctggtcacgaagccccacactgggtcaaccacttccaaactgttgctccattgtacgaaccacaccaaagaaagaacatcttttactctaactgtggtattgttgctatgggctctattttgacctatttgtccatggttttctctccattaactgttttcatgtactacggtatcccatacttgggtgttaatgcttggattgtttgcattacttacttacaacacactgatccaaaggttcctcacttcagagacaacgaatggaattttcaaagaggtgccgcttgtaccatcgatagatccttcggtactattgtcaaccacttgcaccaccacatcggcgattcccaccaatgtcaccacatgttctctcaaatgccattctacaatgctgtcgaagctactaagtatctaaaggccaagctaggtaagtactacatcttcgacgacactccaattgccaaggctttgtacagaaactggagagaatgtaaattcgtcgaagacgaaggtgatgttgttttctacaagcactaa

SEQ ID NO: 863 - DNA, 1212 bp, Artificial sequence
  Delta-15 Desaturase
atggcccctccacacgtcgtcgacgaacaagttagaagaagaatcgttgttgaagacgagattaagtcaaagaaacaattcgagagaaactacgtcccaatggatttcactatcaaggaaatcagagacgctatccctgctcacttattcatcagagacacaactaagtcaattctacacgttgtcaaagatttggttaccattgccattgttttctactgtgctaccttcatcgaaactttgccatccttggctttgagagttccagcatggatcacctactggattattcaaggtaccgtcatggttggtccatggattttggctcacgaatgtggtcacggtgccttttctgactacaagaggatcaacaccattttcggttgggtcttgcattccgctttgttggttccttatcaggcatgggcaatgtcacactctaagcaccacaagtatactggtcctatggagaaggatttggtcttcattccagctactcgttcctacaaaggtctacctgccctagaaaagcctgctgttgaagaagaagtttctgaacaagaacatcaccaccatgaagaatccatctttgctgaaaccccaatctacactttgggtgccttgttgttcgttttaaccttcggttggccattgtacctaattgttaacttctctggtcacgaagccccacactgggtcaaccacttccaaactgttgctccattgtacgaaccacaccaaagaaagaacatcttttactctaactgtggtattgttgctatgggctctattttgacctatttgtccatggttttctctccattaactgttttcatgtactacggtatcccatacttgggtgttaatgcttggattgtttgcattacttacttacaacacactgatccaaaggttcctcacttcagagacaacgaatggaattttcaaagaggtgccgcttgtaccatcgatagatccttcggtactattgtcaaccacttgcaccaccacatcggcgattcccaccaatgtcaccacatgttctctcaaatgccattctacaatgctgtcgaagctactaagtatctaaaggccaagctaggtaagtactacatcttcgacgacactccaattgccaaggctttgtacagaaactggagagaatgtaaattcgtcgaagacgaaggtgatgttgttttctacaagcactaa

SEQ ID NO: 864 - DNA, 1212 bp, Artificial sequence
  Delta-15 Desaturase
atggcccctccacacgtcgtcgacgaacaagttagaagaagaatcgttgttgaagacgagattaagtcaaagaaacaattcgagagaaactacgtcccaatggatttcactatcaaggaaatcagagacgctatccctgctcacttattcatcagagacacaactaagtcaattctacacgttgtcaaagatttggttaccattgccattgttttctactgtgctaccttcatcgaaactttgccatccttggctttgagagttccagcatggatcacctactggattattcaaggtaccgtcatggttggtccatggattttggctcacgaatgtggtcacggtgccttttctaaacccaggacgttcaacaacattttgggttgggtcttgcattccgctttgttggttccttatcaggcatgggcaatgtcacactctaagcaccacaaggatactggtactatgaagaaggatgtcgtcttcattccagctactcgttcctacaaaggtctacctgccctagaaaagcctgctgttgaagaagaagtttctgaacaagaacatcaccaccatgaagaatccatctttgctgaaaccccaatctacactttgggtgccttgttgttcgttttaaccttcggttggccattgtacctaattgttaacttctctggtcacgaagccccacactgggtcaaccacttccaaactgttgctccattgtacgaaccacaccaaagaaagaacatcttttactctaactgtggtattgttgctatgggctctattttgacctatttgtccatggttttctctccattaactgttttcatgtactacggtatcccatacttgggtgttaatgcttggattgtttgcattacttacttacaacacactgatccaaaggttcctcacttcagagacaacgaatggaattttcaaagaggtgccgcttgtaccatcgatagatccttcggtactattgtcaaccacttgcaccaccacatcggcgattcccaccaatgtcaccacatgttctctcaaatgccattctacaatgctgtcgaagctactaagtatctaaaggccaagctaggtaagtactacatcttcgacgacactccaattgccaaggctttgtacagaaactggagagaatgtaaattcgtcgaagacgaaggtgatgttgttttctacaagcactaa

SEQ ID NO: 865 - DNA, 1212 bp, Artificial sequence
  Delta-15 Desaturase
atggcccctccacacgtcgtcgacgaacaagttagaagaagaatcgttgttgaagacgagattaagtcaaagaaacaattcgagagaaactacgtcccaatggatttcactatcaaggaaatcagagacgctatccctgctcacttattcatcagagacacaactaagtcaattctacacgttgtcaaagatttggttaccattgccattgttttctactgtgctaccttcatcgaaactttgccatccttggctttgagagttccagcatggatcacctactggattattcaaggtaccgtcatggttggtccatggattttggctcacgaatgtggtcacggtgccttttctaaacacacgacgatcaacaacattttgggttgggtcttgcattccgctttgttggttccttatcaggcatgggcaatgtcacactctaagcaccacaagtgtactggtcctatgtcgaaggatgtcgtcttcattccagctactcgttcctacaaaggtctacctgccctagaaaagcctgctgttgaagaagaagtttctgaacaagaacatcaccaccatgaagaatccatctttgctgaaaccccaatctacactttgggtgccttgttgttcgttttaaccttcggttggccattgtacctaattgttaacttctctggtcacgaagccccacactgggtcaaccacttccaaactgttgctccattgtacgaaccacaccaaagaaagaacatcttttactctaactgtggtattgttgctatgggctctattttgacctatttgtccatggttttctctccattaactgttttcatgtactacggtatcccatacttgggtgttaatgcttggattgtttgcattacttacttacaacacactgatccaaaggttcctcacttcagagacaacgaatggaattttcaaagaggtgccgcttgtaccatcgatagatccttcggtactattgtcaaccacttgcaccaccacatcggcgattcccaccaatgtcaccacatgttctctcaaatgccattctacaatgctgtcgaagctactaagtatctaaaggccaagctaggtaagtactacatcttcgacgacactccaattgccaaggctttgtacagaaactggagagaatgtaaattcgtcgaagacgaaggtgatgttgttttctacaagcactaa

SEQ ID NO: 866 - DNA, 1212 bp, Artificial sequence
  Delta-15 Desaturase
atggcccctccacacgtcgtcgacgaacaagttagaagaagaatcgttgttgaagacgagattaagtcaaagaaacaattcgagagaaactacgtcccaatggatttcactatcaaggaaatcagagacgctatccctgctcacttattcatcagagacacaactaagtcaattctacacgttgtcaaagatttggttaccattgccattgttttctactgtgctaccttcatcgaaactttgccatccttggctttgagagttccagcatggatcacctactggattattcaaggtaccgtcatggttggtccatggattttggctcacgaatgtggtcacggtgccttttctgattccaagtcgatcaactccattatcggttgggtcttgcattccgctttgttggttccttatcaggcatgggcaatgtcacactctaagcaccacaagtctactggtactatgacgaaggatatggtcttcattccagctactcgttcctacaaaggtctacctgccctagaaaagcctgctgttgaagaagaagtttctgaacaagaacatcaccaccatgaagaatccatctttgctgaaaccccaatctacactttgggtgccttgttgttcgttttaaccttcggttggccattgtacctaattgttaacttctctggtcacgaagccccacactgggtcaaccacttccaaactgttgctccattgtacgaaccacaccaaagaaagaacatcttttactctaactgtggtattgttgctatgggctctattttgacctatttgtccatggttttctctccattaactgttttcatgtactacggtatcccatacttgggtgttaatgcttggattgtttgcattacttacttacaacacactgatccaaaggttcctcacttcagagacaacgaatggaattttcaaagaggtgccgcttgtaccatcgatagatccttcggtactattgtcaaccacttgcaccaccacatcggcgattcccaccaatgtcaccacatgttctctcaaatgccattctacaatgctgtcgaagctactaagtatctaaaggccaagctaggtaagtactacatcttcgacgacactccaattgccaaggctttgtacagaaactggagagaatgtaaattcgtcgaagacgaaggtgatgttgttttctacaagcactaa

SEQ ID NO: 867 - DNA, 1212 bp, Artificial sequence
  Delta-15 Desaturase
atggcccctccacacgtcgtcgacgaacaagttagaagaagaatcgttgttgaagacgagattaagtcaaagaaacaattcgagagaaactacgtcccaatggatttcactatcaaggaaatcagagacgctatccctgctcacttattcatcagagacacaactaagtcaattctacacgttgtcaaagatttggttaccattgccattgttttctactgtgctaccttcatcgaaactttgccatccttggctttgagagttccagcatggatcacctactggattattcaaggtaccgtcatggttggtccatggattttggctcacgaatgtggtcacggtgccttttctcaatccaagtcgttcaacaccattttgggttgggtcttgcattccgctttgttggttccttatcaggcatgggcaatgtcacactctaagcaccacaaggctactggtggtatgaagaaggatttggtcttcattccagctactcgttcctacaaaggtctacctgccctagaaaagcctgctgttgaagaagaagtttctgaacaagaacatcaccaccatgaagaatccatctttgctgaaaccccaatctacactttgggtgccttgttgttcgttttaaccttcggttggccattgtacctaattgttaacttctctggtcacgaagccccacactgggtcaaccacttccaaactgttgctccattgtacgaaccacaccaaagaaagaacatcttttactctaactgtggtattgttgctatgggctctattttgacctatttgtccatggttttctctccattaactgttttcatgtactacggtatcccatacttgggtgttaatgcttggattgtttgcattacttacttacaacacactgatccaaaggttcctcacttcagagacaacgaatggaattttcaaagaggtgccgcttgtaccatcgatagatccttcggtactattgtcaaccacttgcaccaccacatcggcgattcccaccaatgtcaccacatgttctctcaaatgccattctacaatgctgtcgaagctactaagtatctaaaggccaagctaggtaagtactacatcttcgacgacactccaattgccaaggctttgtacagaaactggagagaatgtaaattcgtcgaagacgaaggtgatgttgttttctacaagcactaa

SEQ ID NO: 868 - DNA, 1212 bp, Artificial sequence
  Delta-15 Desaturase
atggcccctccacacgtcgtcgacgaacaagttagaagaagaatcgttgttgaagacgagattaagtcaaagaaacaattcgagagaaactacgtcccaatggatttcactatcaaggaaatcagagacgctatccctgctcacttattcatcagagacacaactaagtcaattctacacgttgtcaaagatttggttaccattgccattgttttctactgtgctaccttcatcgaaactttgccatccttggctttgagagttccagcatggatcacctactggattattcaaggtaccgtcatggttggtccatggattttggctcacgaatgtggtcacggtgccttttctaatcacaggtggatcaacaccattatgggttgggtcttgcattccgctttgttggttccttatcaggcatgggcaatgtcacactctaagcaccacaagtctactggtcgtatgacgaaggatgtggtcttcattccagctactcgttcctacaaaggtctacctgccctagaaaagcctgctgttgaagaagaagtttctgaacaagaacatcaccaccatgaagaatccatctttgctgaaaccccaatctacactttgggtgccttgttgttcgttttaaccttcggttggccattgtacctaattgttaacttctctggtcacgaagccccacactgggtcaaccacttccaaactgttgctccattgtacgaaccacaccaaagaaagaacatcttttactctaactgtggtattgttgctatgggctctattttgacctatttgtccatggttttctctccattaactgttttcatgtactacggtatcccatacttgggtgttaatgcttggattgtttgcattacttacttacaacacactgatccaaaggttcctcacttcagagacaacgaatggaattttcaaagaggtgccgcttgtaccatcgatagatccttcggtactattgtcaaccacttgcaccaccacatcggcgattcccaccaatgtcaccacatgttctctcaaatgccattctacaatgctgtcgaagctactaagtatctaaaggccaagctaggtaagtactacatcttcgacgacactccaattgccaaggctttgtacagaaactggagagaatgtaaattcgtcgaagacgaaggtgatgttgttttctacaagcactaa

SEQ ID NO: 869 - DNA, 1212 bp, Artificial sequence
  Delta-15 Desaturase
atggcccctccacacgtcgtcgacgaacaagttagaagaagaatcgttgttgaagacgagattaagtcaaagaaacaattcgagagaaactacgtcccaatggatttcactatcaaggaaatcagagacgctatccctgctcacttattcatcagagacacaactaagtcaattctacacgttgtcaaagatttggttaccattgccattgttttctactgtgctaccttcatcgaaactttgccatccttggctttgagagttccagcatggatcacctactggattattcaaggtaccgtcatggttggtccatggattttggctcacgaatgtggtcacggtgccttttctgattccaagactatcaacactattttcggttgggtcttgcattccgctttgttggttccttatcaggcatgggcaatgtcacactctaagcaccacaagtttactggtcctatgtcgaaggatatggtcttcattccagctactcgttcctacaaaggtctacctgccctagaaaagcctgctgttgaagaagaagtttctgaacaagaacatcaccaccatgaagaatccatctttgctgaaaccccaatctacactttgggtgccttgttgttcgttttaaccttcggttggccattgtacctaattgttaacttctctggtcacgaagccccacactgggtcaaccacttccaaactgttgctccattgtacgaaccacaccaaagaaagaacatcttttactctaactgtggtattgttgctatgggctctattttgacctatttgtccatggttttctctccattaactgttttcatgtactacggtatcccatacttgggtgttaatgcttggattgtttgcattacttacttacaacacactgatccaaaggttcctcacttcagagacaacgaatggaattttcaaagaggtgccgcttgtaccatcgatagatccttcggtactattgtcaaccacttgcaccaccacatcggcgattcccaccaatgtcaccacatgttctctcaaatgccattctacaatgctgtcgaagctactaagtatctaaaggccaagctaggtaagtactacatcttcgacgacactccaattgccaaggctttgtacagaaactggagagaatgtaaattcgtcgaagacgaaggtgatgttgttttctacaagcactaa

SEQ ID NO: 870 - DNA, 1212 bp, Artificial sequence
  Delta-15 Desaturase
atggcccctccacacgtcgtcgacgaacaagttagaagaagaatcgttgttgaagacgagattaagtcaaagaaacaattcgagagaaactacgtcccaatggatttcactatcaaggaaatcagagacgctatccctgctcacttattcatcagagacacaactaagtcaattctacacgttgtcaaagatttggttaccattgccattgttttctactgtgctaccttcatcgaaactttgccatccttggctttgagagttccagcatggatcacctactggattattcaaggtaccgtcatggttggtccatggattttggctcacgaatgtggtcacggtgccttttctgattccaagactatcaacactattttcggttgggtcttgcattccgctttgttggttccttatcaggcatgggcaatgtcacactctaagcaccacaagggtactggttccatgactaaggatgttgtcttcattccagctactcgttcctacaaaggtctacctgccctagaaaagcctgctgttgaagaagaagtttctgaacaagaacatcaccaccatgaagaatccatctttgctgaaaccccaatctacaatttgatctcgttcgtcgtccacctgaccttcggttggccattgtacctaattgttaacttctctggtcacgaagccccacactgggtcaaccacttccaaactgttgctccattgtacgaaccacaccaaagaaagaacatcttttactctaactgtggtattgttgctatgggctctattttgacctatttgtccatggttttctctccattaactgttttcatgtactacggtatcccatacttgggtgttaatgcttggattgtttgcattacttacttacaacacactgatccaaaggttcctcacttcagagacaacgaatggaattttcaaagaggtgccgcttgtaccatcgatagatccttcggtactattgtcaaccacttgcaccaccacatcggcgattcccaccaatgtcaccacatgttctctcaaatgccattctacaatgctgtcgaagctactaagtatctaaaggccaagctaggtaagtactacatcttcgacgacactccaattgccaaggctttgtacagaaactggagagaatgtaaattcgtcgaagacgaaggtgatgttgttttctacaagcactaa

SEQ ID NO: 871 - DNA, 1212 bp, Artificial sequence
  Delta-15 Desaturase
atggcccctccacacgtcgtcgacgaacaagttagaagaagaatcgttgttgaagacgagattaagtcaaagaaacaattcgagagaaactacgtcccaatggatttcactatcaaggaaatcagagacgctatccctgctcacttattcatcagagacacaactaagtcaattctacacgttgtcaaagatttggttaccattgccattgttttctactgtgctaccttcatcgaaactttgccatccttggctttgagagttccagcatggatcacctactggattattcaaggtaccgtcatggttggtccatggattttggctcacgaatgtggtcacggtgccttttctgattccaagactatcaacactattttcggttgggtcttgcattccgctttgttggttccttatcaggcatgggcaatgtcacactctaagcaccacaagggtactggttccatgactaaggatgttgtcttcattccagctactcgttcctacaaaggtctacctgccctagaaaagcctgctgttgaagaagaagtttctgaacaagaacatcaccaccatgaagaatccatctttgctgaaaccccaatctacagtttggtcgcgttcgtcaccgaccagaccttcggttggccattgtacctaattgttaacttctctggtcacgaagccccacactgggtcaaccacttccaaactgttgctccattgtacgaaccacaccaaagaaagaacatcttttactctaactgtggtattgttgctatgggctctattttgacctatttgtccatggttttctctccattaactgttttcatgtactacggtatcccatacttgggtgttaatgcttggattgtttgcattacttacttacaacacactgatccaaaggttcctcacttcagagacaacgaatggaattttcaaagaggtgccgcttgtaccatcgatagatccttcggtactattgtcaaccacttgcaccaccacatcggcgattcccaccaatgtcaccacatgttctctcaaatgccattctacaatgctgtcgaagctactaagtatctaaaggccaagctaggtaagtactacatcttcgacgacactccaattgccaaggctttgtacagaaactggagagaatgtaaattcgtcgaagacgaaggtgatgttgttttctacaagcactaa

SEQ ID NO: 872 - DNA, 1212 bp, Artificial sequence
  Delta-15 Desaturase
atggcccctccacacgtcgtcgacgaacaagttagaagaagaatcgttgttgaagacgagattaagtcaaagaaacaattcgagagaaactacgtcccaatggatttcactatcaaggaaatcagagacgctatccctgctcacttattcatcagagacacaactaagtcaattctacacgttgtcaaagatttggttaccattgccattgttttctactgtgctaccttcatcgaaactttgccatccttggctttgagagttccagcatggatcacctactggattattcaaggtaccgtcatggttggtccatggattttggctcacgaatgtggtcacggtgccttttctgattccaagactatcaacactattttcggttgggtcttgcattccgctttgttggttccttatcaggcatgggcaatgtcacactctaagcaccacaagggtactggttccatgactaaggatgttgtcttcattccagctactcgttcctacaaaggtctacctgccctagaaaagcctgctgttgaagaagaagtttctgaacaagaacatcaccaccatgaagaatccatctttgctgaaaccccaatctacactttgatcgcgttcatcgtcctccagaccttcggttggccattgtacctaattgttaacttctctggtcacgaagccccacactgggtcaaccacttccaaactgttgctccattgtacgaaccacaccaaagaaagaacatcttttactctaactgtggtattgttgctatgggctctattttgacctatttgtccatggttttctctccattaactgttttcatgtactacggtatcccatacttgggtgttaatgcttggattgtttgcattacttacttacaacacactgatccaaaggttcctcacttcagagacaacgaatggaattttcaaagaggtgccgcttgtaccatcgatagatccttcggtactattgtcaaccacttgcaccaccacatcggcgattcccaccaatgtcaccacatgttctctcaaatgccattctacaatgctgtcgaagctactaagtatctaaaggccaagctaggtaagtactacatcttcgacgacactccaattgccaaggctttgtacagaaactggagagaatgtaaattcgtcgaagacgaaggtgatgttgttttctacaagcactaa

SEQ ID NO: 873 - DNA, 1212 bp, Artificial sequence
  Delta-15 Desaturase
atggcccctccacacgtcgtcgacgaacaagttagaagaagaatcgttgttgaagacgagattaagtcaaagaaacaattcgagagaaactacgtcccaatggatttcactatcaaggaaatcagagacgctatccctgctcacttattcatcagagacacaactaagtcaattctacacgttgtcaaagatttggttaccattgccattgttttctactgtgctaccttcatcgaaactttgccatccttggctttgagagttccagcatggatcacctactggattattcaaggtaccgtcatggttggtccatggattttggctcacgaatgtggtcacggtgccttttctgattccaagactatcaacactattttcggttgggtcttgcattccgctttgttggttccttatcaggcatgggcaatgtcacactctaagcaccacaagggtactggttccatgactaaggatgttgtcttcattccagctactcgttcctacaaaggtctacctgccctagaaaagcctgctgttgaagaagaagtttctgaacaagaacatcaccaccatgaagaatccatctttgctgaaaccccaatctacagtttggtcgcgttcgtcgccctccagaccttcggttggccattgtacctaattgttaacttctctggtcacgaagccccacactgggtcaaccacttccaaactgttgctccattgtacgaaccacaccaaagaaagaacatcttttactctaactgtggtattgttgctatgggctctattttgacctatttgtccatggttttctctccattaactgttttcatgtactacggtatcccatacttgggtgttaatgcttggattgtttgcattacttacttacaacacactgatccaaaggttcctcacttcagagacaacgaatggaattttcaaagaggtgccgcttgtaccatcgatagatccttcggtactattgtcaaccacttgcaccaccacatcggcgattcccaccaatgtcaccacatgttctctcaaatgccattctacaatgctgtcgaagctactaagtatctaaaggccaagctaggtaagtactacatcttcgacgacactccaattgccaaggctttgtacagaaactggagagaatgtaaattcgtcgaagacgaaggtgatgttgttttctacaagcactaa

SEQ ID NO: 874 - DNA, 1212 bp, Artificial sequence
  Delta-15 Desaturase
atggcccctccacacgtcgtcgacgaacaagttagaagaagaatcgttgttgaagacgagattaagtcaaagaaacaattcgagagaaactacgtcccaatggatttcactatcaaggaaatcagagacgctatccctgctcacttattcatcagagacacaactaagtcaattctacacgttgtcaaagatttggttaccattgccattgttttctactgtgctaccttcatcgaaactttgccatccttggctttgagagttccagcatggatcacctactggattattcaaggtaccgtcatggttggtccatggattttggctcacgaatgtggtcacggtgccttttctgattccaagactatcaacactattttcggttgggtcttgcattccgctttgttggttccttatcaggcatgggcaatgtcacactctaagcaccacaagggtactggttccatgactaaggatgttgtcttcattccagctactcgttcctacaaaggtctacctgccctagaaaagcctgctgttgaagaagaagtttctgaacaagaacatcaccaccatgaagaatccatctttgctgaaaccccaatctacattttgatctcgttcatcaccgaccagaccttcggttggccattgtacctaattgttaacttctctggtcacgaagccccacactgggtcaaccacttccaaactgttgctccattgtacgaaccacaccaaagaaagaacatcttttactctaactgtggtattgttgctatgggctctattttgacctatttgtccatggttttctctccattaactgttttcatgtactacggtatcccatacttgggtgttaatgcttggattgtttgcattacttacttacaacacactgatccaaaggttcctcacttcagagacaacgaatggaattttcaaagaggtgccgcttgtaccatcgatagatccttcggtactattgtcaaccacttgcaccaccacatcggcgattcccaccaatgtcaccacatgttctctcaaatgccattctacaatgctgtcgaagctactaagtatctaaaggccaagctaggtaagtactacatcttcgacgacactccaattgccaaggctttgtacagaaactggagagaatgtaaattcgtcgaagacgaaggtgatgttgttttctacaagcactaa

SEQ ID NO: 875 - DNA, 1212 bp, Artificial sequence
  Delta-15 Desaturase
atggcccctccacacgtcgtcgacgaacaagttagaagaagaatcgttgttgaagacgagattaagtcaaagaaacaattcgagagaaactacgtcccaatggatttcactatcaaggaaatcagagacgctatccctgctcacttattcatcagagacacaactaagtcaattctacacgttgtcaaagatttggttaccattgccattgttttctactgtgctaccttcatcgaaactttgccatccttggctttgagagttccagcatggatcacctactggattattcaaggtaccgtcatggttggtccatggattttggctcacgaatgtggtcacggtgccttttctgattccaagactatcaacactattttcggttgggtcttgcattccgctttgttggttccttatcaggcatgggcaatgtcacactctaagcaccacaagggtactggttccatgactaaggatgttgtcttcattccagctactcgttcctacaaaggtctacctgccctagaaaagcctgctgttgaagaagaagtttctgaacaagaacatcaccaccatgaagaatccatctttgctgaaaccccaatctacagtttgatcgcgttcatcatcgaccagaccttcggttggccattgtacctaattgttaacttctctggtcacgaagccccacactgggtcaaccacttccaaactgttgctccattgtacgaaccacaccaaagaaagaacatcttttactctaactgtggtattgttgctatgggctctattttgacctatttgtccatggttttctctccattaactgttttcatgtactacggtatcccatacttgggtgttaatgcttggattgtttgcattacttacttacaacacactgatccaaaggttcctcacttcagagacaacgaatggaattttcaaagaggtgccgcttgtaccatcgatagatccttcggtactattgtcaaccacttgcaccaccacatcggcgattcccaccaatgtcaccacatgttctctcaaatgccattctacaatgctgtcgaagctactaagtatctaaaggccaagctaggtaagtactacatcttcgacgacactccaattgccaaggctttgtacagaaactggagagaatgtaaattcgtcgaagacgaaggtgatgttgttttctacaagcactaa

SEQ ID NO: 876 - DNA, 1212 bp, Artificial sequence
  Delta-15 Desaturase
atggcccctccacacgtcgtcgacgaacaagttagaagaagaatcgttgttgaagacgagattaagtcaaagaaacaattcgagagaaactacgtcccaatggatttcactatcaaggaaatcagagacgctatccctgctcacttattcatcagagacacaactaagtcaattctacacgttgtcaaagatttggttaccattgccattgttttctactgtgctaccttcatcgaaactttgccatccttggctttgagagttccagcatggatcacctactggattattcaaggtaccgtcatggttggtccatggattttggctcacgaatgtggtcacggtgccttttctgatcacaagtggttcaactccattatcggttgggtcttgcattccgctttgttggttccttatcaggcatgggcaatgtcacactctaagcaccacaagtttactggtagtatggcgaaggatctggtcttcattccagctactcgttcctacaaaggtctacctgccctagaaaagcctgctgttgaagaagaagtttctgaacaagaacatcaccaccatgaagaatccatctttgctgaaaccccaatctacactttgggtgccttgttgttcgttttaaccttcggttggccattgtacctaattgttaacttctctggtcacgaagccccacactgggtcaaccacttccaaactgttgctccattgtacgaaccacaccaaagaaagaacatcttttactctaactgtggtattgttgctatgggctctattttgacctatttgtccatggttttctctccattaactgttttcatgtactacggtatcccatacttgggtgttaatgcttggattgtttgcattacttacttacaacacactgatccaaaggttcctcacttcagagacaacgaatggaattttcaaagaggtgccgcttgtaccatcgatagatccttcggtactattgtcaaccacttgcaccaccacatcggcgattcccaccaatgtcaccacatgttctctcaaatgccattctacaatgctgtcgaagctactaagtatctaaaggccaagctaggtaagtactacatcttcgacgacactccaattgccaaggctttgtacagaaactggagagaatgtaaattcgtcgaagacgaaggtgatgttgttttctacaagcactaa

SEQ ID NO: 877 - DNA, 1212 bp, Artificial sequence
  Delta-15 Desaturase
atggcccctccacacgtcgtcgacgaacaagttagaagaagaatcgttgttgaagacgagattaagtcaaagaaacaattcgatagaaactacgtcccaatggatttcactatcaaggaaatcagagacgctatccctgctcacttattcatcagagacacaactaagtcaattctacacgttgtcaaagatttggttaccattgccattgttttctactgtgctaccttcatcgaaactttgccatccttggctttgagagttccagcatggatcacctactggattattcaaggtaccgtcatggttggtccatggattttggctcacgaatgtggtcacggtgccttttctgaatacacgtcgttcaactacattttcggttgggtcttgcattccgctttgttggttccttatcaggcatgggcaatgtcacactctaagcaccacaagtttactggtagtatggcgaaggatctggtcttcattccagctactcgttcctacaaaggtctacctgccctagaaaagcctgctgttgaagaagaagtttctgaacaagaacatcaccaccatgaagaatccatctttgctgaaaccacaatctacactttgggtgccttgttgttcgttttaaccttcggttggccattgtacctaattgttaacttctctggtcacgaagccccacactgggtcaaccacttccaaactgttgctccattgtacgaaccacaccaaagaaagaacatcttttactctaactgtggtattgttgctatgggctctattttgacctatttgtccatggttttctctccattaactgttttcatgtactacggtatcccatacttgggtgttaatgcttggattgtttgcattacttacttacaacacactgatccaaaggttcctcacttcagagacaacgaatggaattttcaaagaggtgccgcttgtaccatcgatagatccttcggtactattgtcaaccacttgcaccaccacatcggcgattcccaccaatgtcaccacatgttctctcaaatgccattctacaatgctgtcgaagctactaagtatctaaaggccaagctaggtaagtactacatcttcgacgacactccaattgccaaggctttgtacagaaactggagagaatgtaaattcgtcgaagacgaaggtgatgttgttttctacaagcactaa

SEQ ID NO: 878 - DNA, 1212 bp, Artificial sequence
  Delta-15 Desaturase
atggcccctccacacgtcgtcgacgaacaagttagaagaagaatcgttgttgaagacgagattaagtcaaagaaacaattcgagagaaactacgtcccaatggatttcactatcaaggaaatcagagacgctatccctgctcacttattcatcagagacacaactaagtcaattctacacgttgtcaaagatttggttaccattgccattgttttctactgtgctaccttcatcgaaactttgccatccttggctttgagagttccagcatggatcacctactggattattcaaggtaccgtcatggttggtccatggattttggctcacgaatgtggtcacggtgccttttctaagcacaagacgttcaactacattttcggttgggtcttgcattccgctttgttggttccttatcaggcatgggcaatgtcacactctaagcaccacaaggctactggtactatgactaatgatgttgtcttcattccagctactcgttcctacaaaggtctacctgccctagaaaagcctgctgttgaagaagaagtttctgaacaagaacatcaccaccatgaagaatccatctttgctgaaaccccaatctacactttgggtgccttgttgttcgttttaaccttcggttggccattgtacctaattgttaacttctctggtcacgaagccccacactgggtcaaccacttccaaactgttgctccattgtacgaaccacaccaaagaaagaacatcttttactctaactgtggtattgttgctatgggctctattttgacctatttgtccatggttttctctccattaactgttttcatgtactacggtatcccatacttgggtgttaatgcttggattgtttgcattacttacttacaacacactgatccaaaggttcctcacttcagagacaacgaatggaattttcaaagaggtgccgcttgtaccatcgatagatccttcggtactattgtcaaccacttgcaccaccacatcggcgattcccaccaatgtcaccacatgttctctcaaatgccattctacaatgctgtcgaagctactgagtatctaaaggccaagctaggtaagtactacatcttcgacgacactccaattgccaaggctttgtacagaaactggagagaatgtaaattcgtcgaagacgaaggtgatgttgttttctacaagcactaa

SEQ ID NO: 879 - DNA, 1212 bp, Artificial sequence
  Delta-15 Desaturase
atggcccctccacacgtcgtcgacgaacaagttagaagaagaatcgttgttgaagacgagattaagtcaaagaaacaattcgagagaaactacgtcccaatggatttcactatcaaggaaatcagagacgctatccctgctcacttattcatcagagacacaactaagtcaattctacacgttgtcaaagatttggttaccattgccattgttttctactgtgctaccttcatcgaaactttgccatccttggctttgagagttccagcatggatcacctactggattattcaaggtaccgtcatggttggtccatggattttggctcacgaatgtggtcacggtgccttttctcaatccaagacgatcaacaccattttgggttgggtcttgcattccgctttgttggttccttatcaggcatgggcaatgtcacactctaagcaccacaaggctactggtactatgactaaggatgttgtcttcattccagctactcgttcctacaaaggtctacctgccctagaaaagcctgctgttgaagaagaagtttctgaacaagaacatcaccaccatgaagaatccatctttgctgaaaccccaatctacactttgggtgccttgttgttcgttttaaccttcggttggccattgtacctaattgttaacttctctggtcacgaagccccacactgggtcaaccacttccaaactgttgctccattgtacgaaccacaccaaagaaagaacatcttttactctaactgtggtattgttgctatgggctctattttgacctatttgtccatggttttctctccattaactgttttcatgtactacggtatcccatacttgggttttaatgcttggattgtttgcattacttacttacaacacactgatccaaaggttcctcacttcagagacaacgaatggaattttcaaagaggtgccgcttgtaccatcgatagatccttcggtactattgtcaaccacttgcaccaccacatcggcgattcccaccaatgtcaccacatgttctctcaaatgccattctacaatgctgtcgaagctactaagtatctaaaggccaagctaggtaagtactacatcttcgacgacactccaattgccaaggctttgtacagaaactggagagaatgtaaattcgtcgaagacgaaggtgatgttgttttctacaagcactaa

SEQ ID NO: 880 - DNA, 1212 bp, Artificial sequence
  Delta-15 Desaturase
atggcccctccacacgtcgtcgacgaacaagttagaagaagaatcgttgttgaagacgagattaagtcaaagaaacaattcgagagaaactacgtcccaatggatttcactatcaaggaaatcagagacgctatccctgctcacttattcatcagagacacaactaagtcaattctacacgttgtcaaagatttggttaccattgccattgttttctactgtgctaccttcatcgaaactttgccatccttggctttgagagttccagcatggatcacctactggattattcaaggtaccgtcatggttggtccatggattttggctcacgaatgtggtcacggtgccttttctcagcccacgacgatcaactccattatcggttgggtcttgcattccgctttgttggttccttatcaggcatgggcaatgtcacactctaagcaccacaagtttactggtactatggcgaaggatgtcgtcttcattccagctactcgttcctacaaaggtctacctgccctagaaaagcctgctgttgaagaagaagtttctgaacaagaacatcaccaccatgaagaatccatctttgctgaaaccccaatctacactttgggtgccttgttgttcgttttaaccttcggttggccattgtacctaattgttaacttctctggtcacgaagccccacactgggtcaaccacttccaaactgttgctccattgtacgaaccacaccaaagaaagaacatcttttactctaactgtggtattgttgctatgggctctattttgacctatttgtccatggttttctctccattaactgttttcatgtactacggtatcccatacttgggtgttaatgcttggattgtttgcattacttacttacaacacactgatccaaaggttcctcacttcagagacaacgaatggaattttcaaagaggtgccgcttgtaccatcgatagatccttcggtactattgtcaaccacttgcaccaccacatcggcgattcccaccaatgtcaccacatgttctctcaaatgccattctacaatgctgtcgaagctactaagtatctaaaggccaagctaggtaagtactacatcttcgacgacactccaattgccaaggctttgtacagaaactggagagaatgtaaattcgtcgaagacgaaggtgatgttgttttctacaagcactaa

SEQ ID NO: 881 - DNA, 1212 bp, Artificial sequence
  Delta-15 Desaturase
atggcccctccacacgtcgtcgacgaacaagttagaagaagaatcgttgttgaagacgagattaagtcaaagaaacaattcgagagaaactacgtcccaatggatttcactatcaaggaaatcagagacgctatccctgctcacttattcatcagagacacaactaagtcaattctacacgttgtcaaagatttggttaccattgccattgttttctactgtgctaccttcatcgaaactttgccatccttggctttgagagttccagcatggatcacctactggattattcaaggtaccgtcatggttggtccatggattttggctcacgaatgtggtcacggtgccttttctgagtacacgtcgttcaactccattatcggttgggtcttgcattccgctttgttggttccttatcaggcatgggcaatgtcacactctaagcaccacaagtttactggtactatggcgaaggatgtcgtcttcattccagctactcgttcctacaaaggtctacctgccctagaaaagcctgctgttgaagaagaagtttctgaacaagaacatcaccaccatgaagaatccatctttgctgaaaccccaatctacactttgggtgccttgttgttcgttttaaccttcggttggccattgtacctaattgttaacttctctggtcacgaagccccacactgggtcaaccacttccaaactgttgctccattgtacgaaccacaccaaagaaagaacatcttttactctaactgtggtattgttgctatgggctctattttgacctatttgtccatggttttctctccattaactgttttcatgtactacggtatcccatacttgggtgttaatgcttggattgtttgcattacttacttacaacacactgatccaaaggttcctcacttcagagacaacgaatggaattttcaaagaggtgccgcttgtaccatcgatagatccttcggtactattgtcaaccacttgcaccaccacatcggcgattcccaccaatgtcaccacatgttctctcaaatgccattctacaatgctgtcgaagctactaagtatctaaaggccaagctaggtaagtactacatcttcgacgacactccaattgccaaggctttgtacagaaactggagagaatgtaaattcgtcgaagacgaaggtgatgttgttttctacaagcactaa

SEQ ID NO: 882 - DNA, 1212 bp, Artificial sequence
  Delta-15 Desaturase
atggcccctccacacgtcgtcgacgaacaagttagaagaagaatcgttgttgaagacgagattaagtcaaagaaacaattcgagagaaactacgtcccaatggatttcactatcaaggaaatcagagacgctatccctgctcacttattcatcagagacacaactaagtcaattctacacgttgtcaaagatttggttaccattgccattgttttctactgtgctaccttcatcgaaactttgccatccttggctttgagagttccagcatggatcacctactggattattcaaggtaccgtcatggttggtccatggattttggctcacgaatgtggtcacggtgccttttctgattccaggtggatcaacaacattatgggttgggtcttgcattccgctttgttggttccttatcaggcatgggcaatgtcacactctaagcaccacaagtctactggtactatgactaaggatgttgtcttcattccagctactcgttcctacaaaggtctacctgccctagaaaagcctgctgttgaagaagaagtttctgaacaagaacatcaccaccatgaagaatccatctttgctgaaaccccaatctacactttgggtgccttgttgttcgttttaaccttcggttggccattgtacctaattgttaacttctctggtcacgaagccccacactgggtcaaccacttccaaactgttgctccattgtacgaaccacaccaaagaaagaacatcttttactctaactgtggtattgttgctatgggctctattttgacctatttgtccatggttttctctccattaactgttttcatgtactacggtatcccatacttgggtgttaatgcttggattgtttgcattacttacttacaacacactgatccaaaggttcctcacttcagagacaacgaatggaattttcaaagaggtgccgcttgtaccatcgatagatccttcggtactattgtcaaccacttgcaccaccacatcggcgattcccaccaatgtcaccacatgttctctcaaatgccattctacaatgctgtcgaagctactaagtatctaaaggccaagctaggtaagtactacatcttcgacgacactccaattgccaaggctttgtacagaaactggagagaatgtaaattcgtcgaagacgaaggtgatgttgttttctacaagcactaa

SEQ ID NO: 883 - DNA, 1212 bp, Artificial sequence
  Delta-15 Desaturase
atggcccctccacacgtcgtcgacgaacaagttagaagaagaatcgttgttgaagacgagattaagtcaaagaaacaattcgagagaaactacgtcccaatggatttcactatcaaggaaatcagagacgctatccctgctcacttattcatcagagacacaactaagtcaattctacacgttgtcaaagatttggttaccattgccattgttttctactgtgctaccttcatcgaaactttgccatccttggctttgagagttccagcatggatcacctactggattattcaaggtaccgtcatggttggtccatggattttggctcacgaatgtggtcacggtgccttttctcatcacaagtggttcaacaccattttgggttgggtcttgcattccgctttgttggttccttatcaggcatgggcaatgtcacactctaagcaccacaagtttactggtactatggcgaaggatgtcgtcttcattccagctactcgttcctacaaaggtctacctgccctagaaaagcctgctgttgaagaagaagtttctgaacaagaacatcaccaccatgaagaatccatctttgctgaaaccccaatctacactttgggtgccttgttgttcgttttaaccttcggttggccattgtacctaattgttaacttctctggtcacgaagccccacactgggtcaaccacttccaaactgcctctccattttacaaacataggcaaagaaagaacatcttttactctaactgtggtattgttgctatgggctctattttgacctatttgtccatggttttctctccattaactgttttcatgtactacggtatcccatacttgggtgttaatgcttggattgtttgcattacttacttacaacacactgatccaaaggttcctcacttcagagacaacgaatggaattttcaaagaggtgccgcttgtaccatcgatagatccttcggtactattgtcaaccacttgcaccaccacatcggcgattcccaccaatgtcaccacatgttctctcaaatgccattctacaatgctgtcgaagctactaagtatctaaaggccaagctaggtaagtactacatcttcgacgacactccaattgccaaggctttgtacagaaactggagagaatgtaaattcgtcgaagacgaaggtgatgttgttttctacaagcactaa

SEQ ID NO: 884 - DNA, 1212 bp, Artificial sequence
  Delta-15 Desaturase
atggcccctccacacgtcgtcgacgaacaagttagaagaagaatcgttgttgaagacgagattaagtcaaagaaacaattcgagagaaactacgtcccaatggatttcactatcaaggaaatcagagacgctatccctgctcacttattcatcagagacacaactaagtcaattctacacgttgtcaaagatttggttaccattgccattgttttctactgtgctaccttcatcgaaactttgccatccttggctttgagagttccagcatggatcacctactggattattcaaggtaccgtcatggttggtccatggattttggctcacgaatgtggtcacggtgccttttctcatcacaagtggttcaacaccattttgggttgggtcttgcattccgctttgttggttccttatcaggcatgggcaatgtcacactctaagcaccacaagtttactggtactatggcgaaggatgtcgtcttcattccagctactcgttcctacaaaggtctacctgccctagaaaagcctgctgttgaagaagaagtttctgaacaagaacatcaccaccatgaagaatccatctttgctgaaaccccaatctacactttgggtgccttgttgttcgttttaaccttcggttggccattgtacctaattgttaacttctctggtcacgaagccccacactgggtcaaccacttccaatctgtctctacacttttcgaacaaaggcaaagaaagaacatcttttactctaactgtggtattgttgctatgggctctattttgacctatttgtccatggttttctctccattaactgttttcatgtactacggtatcccatacttgggtgttaatgcttggattgtttgcattacttacttacaacacactgatccaaaggttcctcacttcagagacaacgaatggaattttcaaagaggtgccgcttgtaccatcgatagatccttcggtactattgtcaaccacttgcaccaccacatcggcgattcccaccaatgtcaccacatgttctctcaaatgccattctacaatgctgtcgaagctactaagtatctaaaggccaagctaggtaagtactacatcttcgacgacactccaattgccaaggctttgtacagaaactggagagaatgtaaattcgtcgaagacgaaggtgatgttgttttctacaagcactaa

SEQ ID NO: 885 - DNA, 1212 bp, Artificial sequence
  Delta-15 Desaturase
atggcccctccacacgtcgtcgacgaacaagttagaagaagaatcgttgttgaagacgagattaagtcaaagaaacaattcgagagaaactacgtcccaatggatttcactatcaaggaaatcagagacgctatccctgctcacttattcatcagagacacaactaagtcaattctacacgttgtcaaagatttggttaccattgccattgttttctactgtgctaccttcatcgaaactttgccatccttggctttgagagttccagcatggatcacctactggattattcaaggtaccgtcatggttggtccatggattttggctcacgaatgtggtcacggtgccttttctcactacaggaggttcaactccattttgggttgggtcttgcattccgctttgttggttccttatcaggcatgggcaatgtcacactctaagcaccacaagtttactggtactatggcgaaggatgtcgtcttcattccagctactcgttcctacaaaggtctacctgccgtatattatgtttacttgcatgaagaagtttctgaacaagaacatcaccaccatgaagaatccatctttgctgaaaccccaatctacactttgggtgccttgttgttcgttttaaccttcggttggccattgtacctaattgttaacttctctggtcacgaagccccacactgggtcaaccacttccaaactgttgctccattgtacgaaccacaccaaagaaagaacatcttttactctaactgtggtattgttgctatgggctctattttgacctatttgtccatggttttctctccattaactgttttcatgtactacggtatcccatacttgggtgttaatgcttggattgtttgcattacttacttacaacacactgatccaaaggttcctcacttcagagacaacgaatggaattttcaaagaggtgccgcttgtaccatcgatagatccttcggtactattgtcaaccacttgcaccaccacatcggcgattcccaccaatgtcaccacatgttctctcaaatgccattctacaatgctgtcgaagctactaagtatctaaaggccaagctaggtaagtactacatcttcgacgacactccaattgccaaggctttgtacagaaactggagagaatgtaaattcgtcgaagacgaaggtgatgttgttttctacaagcactaa

SEQ ID NO: 886 - DNA, 1212 bp, Artificial sequence
  Delta-15 Desaturase
atggcccctccacacgtcgtcgacgaacaagttagaagaagaatcgttgttgaagacgagattaagtcaaagaaacaattcgagagaaactacgtcccaatggatttcactatcaaggaaatcagagacgctatccctgctcacttattcatcagagacacaactaagtcaattctacacgttgtcaaagatttggttaccattgccattgttttctactgtgctaccttcatcgaaactttgccatccttggctttgagagttccagcatggatcacctactggattattcaaggtaccgtcatggttggtccatggattttggctcacgaatgtggtcacggtgccttttctcatcacaagtggttcaacaccattttgggttgggtcttgcattccgctttgttggttccttatcaggcatgggcaatgtcacactctaagcaccacaagtttactggtactatggcgaaggatgtcgtcttcattccagctactcgttcctacaaaggtctacctgccctagaaaagcctgctgttgaagaagaagtttctgaacaagaacatcaccaccatgaagaatccatctttgctgaaaccccaatctacactttgggtgccttgttgttcgttttaaccttcggttggccattgtacctaattgttaacttctctggtcacgaagccccacactgggtcaaccacttccaatctatcgcttcaattttcgaaactcggcaaagaaagaacatcttttactctaactgtggtattgttgctatgggctctattttgacctatttgtccatggttttctctccattaactgttttcatgtactacggtatcccatacttgggtgttaatgcttggattgtttgcattacttacttacaacacactgatccaaaggttcctcacttcagagacaacgaatggaattttcaaagaggtgccgcttgtaccatcgatagatccttcggtactattgtcaaccacttgcaccaccacatcggcgattcccaccaatgtcaccacatgttctctcaaatgccattctacaatgctgtcgaagctactaagtatctaaaggccaagctaggtaagtactacatcttcgacgacactccaattgccaaggctttgtacagaaactggagagaatgtaaattcgtcgaagacgaaggtgatgttgttttctacaagcactaa

SEQ ID NO: 887 - DNA, 1212 bp, Artificial sequence
  Delta-15 Desaturase
atggcccctccacacgtcgtcgacgaacaagttagaagaagaatcgttgttgaagacgagattaagtcaaagaaacaattcgagagaaactacgtcccaatggatttcactatcaaggaaatcagagacgctatccctgctcacttattcatcagagacacaactaagtcaattctacacgttgtcaaagatttggttaccattgccattgttttctactgtgctaccttcatcgaaactttgccatccttggctttgagagttccagcatggatcacctactggattattcaaggtaccgtcatggttggtccatggattttggctcacgaatgtggtcacggtgccttttctaaatacaagtggttcaactccattatcggttgggtcttgcattccgctttgttggttccttatcaggcatgggcaatgtcacactctaagcaccacaagtttactggtactatgactaaggatgttgtcttcattccagctactcgttcctacaaaggtctacctgccctagaaaagcctgctgttgaagaagaagtttctgaacaagaacatcaccaccatgaagaatccatctttgctgaaaccccaatctacactttgggtgccttgttgttcgttttaaccttcggttggccattgtacctaattgttaacttctctggtcacgaagccccacactgggtcaaccacttccaagctgtctctccatttttcgaaactaggcaaagaaagaacatcttttactctaactgtggtattgttgctatgggctctattttgacctatttgtccatggttttctctccattaactgttttcatgtactacggtatcccatacttgggtgttaatgcttggattgtttgcattacttacttacaacacactgatccaaaggttcctcacttcagagacaacgaatggaattttcaaagaggtgccgcttgtaccatcgatagatccttcggtactattgtcaaccacttgcaccaccacatcggcgattcccaccaatgtcaccacatgttctctcaaatgccattctacaatgctgtcgaagctactaagtatctaaaggccaagctaggtaagtactacatcttcgacgacactccaattgccaaggctttgtacagaaactggagagaatgtaaattcgtcgaagacgaaggtgatgttgttttctacaagcactaa

SEQ ID NO: 888 - DNA, 1212 bp, Artificial sequence
  Delta-15 Desaturase
atggcccctccacacgtcgtcgacgaacaagttagaagaagaatcgttgttgaagacgagattaagtcaaagaaacaattcgagagaaactacgtcccaatggatttcactatcaaggaaatcagagacgctatccctgctcacttattcatcagagacacaactaagtcaattctacacgttgtcaaagatttggttaccattgccattgttttctactgtgctaccttcatcgaaactttgccatccttggctttgagagttccagcatggatcacctactggattattcaaggtaccgtcatggttggtccatggattttggctcacgaatgtggtcacggtgccttttctaaatacaggtcgatcaactacattatgggttgggtcttgcattccgctttgttggttccttatcaggcatgggcaatgtcacactctaagcaccacaaggctactggtaatatggcgaaggatatggtcttcattccagctactcgttcctacaaaggtctacctgccctagaaaagcctgctgttgaagaagaagtttctgaacaagaacatcaccaccatgaagaatccatctttgctgaaaccccaatctacactttgggtgccttgttgttcgttttaaccttcggttggccattgtacctaattgttaacttctctggtcacgaagccccacactgggtcaaccacttccaatctggcactacagttttcacacaacgtcaaagaaagaacatcttttactctaactgtggtattgttgctatgggctctattttgacctatttgtccatggttttctctccattaactgttttcatgtactacggtatcccatacttgggtgttaatgcttggattgtttgcattacttacttacaacacactgatccaaaggttcctcacttcagagacaacgaatggaattttcaaagaggtgccgcttgtaccatcgatagatccttcggtactattgtcaaccacttgcaccaccacatcggcgattcccaccaatgtcaccacatgttctctcaaatgccattctacaatgctgtcgaagctactaagtatctaaaggccaagctaggtaagtactacatcttcgacgacactccaattgccaaggctttgtacagaaactggagagaatgtaaattcgtcgaagacgaaggtgatgttgttttctacaagcactaa

SEQ ID NO: 889 - DNA, 1212 bp, Artificial sequence
  Delta-15 Desaturase
atggcccctccacacgtcgtcgacgaacaagttagaagaagaatcgttgttgaagacgagattaagtcaaagaaacaattcgagagaaactacgtcccaatggatttcactatcaaggaaatcagagacgctatccctgctcacttattcatcagagacacaactaagtcaattctacacgttgtcaaagatttggttaccattgccattgttttctactgtgctaccttcatcgaaactttgccatccttggctttgagagttccagcatggatcacctactggattattcaaggtaccgtcatggttggtccatggattttggctcacgaatgtggtcacggtgccttttctaaatacaggtcgatcaactacattatgggttgggtcttgcattccgctttgttggttccttatcaggcatgggcaatgtcacactctaagcaccacaaggctactggtaatatggcgaaggatatggtcttcattccagctactcgttcctacaaaggtctacctgccctagaaaagcctgctgttgaagaagaagtttctgaacaagaacatcaccaccatgaagaatccatctttgctgaaaccccaatctacactttgggtgccttgttgttcgttttaaccttcggttggccattgtacctaattgttaacttctctggtcacgaagccccacactgggtcaaccacttccaagctgcctctacagtttacgaacaacagcaaagaaagaacatcttttactctaactgtggtattgttgctatgggctctattttgacctatttgtccatggttttctctccattaactgttttcatgtactacggtatcccatacttgggtgttaatgcttggattgtttgcattacttacttacaacacactgatccaaaggttcctcacttcagagacaacgaatggaattttcaaagaggtgccgcttgtaccatcgatagatccttcggtactattgtcaaccacttgcaccaccacatcggcgattcccaccaatgtcaccacatgttctctcaaatgccattctacaatgctgtcgaagctactaagtatctaaaggccaagctaggtaagtactacatcttcgacgacactccaattgccaaggctttgtacagaaactggagagaatgtaaattcgtcgaagacgaaggtgatgttgttttctacaagcactaa

SEQ ID NO: 890 - DNA, 1212 bp, Artificial sequence
  Delta-15 Desaturase
atggcccctccacacgtcgtcgacgaacaagttagaagaagaatcgttgttgaagacgagattaagtcaaagaaacaattcgagagaaactacgtcccaatggatttcactatcaaggaaatcagagacgctatccctgctcacttattcatcagagacacaactaagtcaattctacacgttgtcaaagatttggttaccattgccattgttttctactgtgctaccttcatcgaaactttgccatccttggctttgagagttccagcatggatcacctactggattattcaaggtaccgtcatggttggtccatggattttggctcacgaatgtggtcacggtgccttttctcactacaggaggttcaactccattttgggttgggtcttgcattccgctttgttggttccttatcaggcatgggcaatgtcacactctaagcaccacaagtttactggtactatggcgaaggatgtcgtcttcattccagctactcgttcctacaaaggtctacctgccgtatctgatgcttactggcatgaagaagtttctgaacaagaacatcaccaccatgaagaatccatctttgctgaaaccccaatctacactttgggtgccttgttgttcgttttaaccttcggttggccattgtacctaattgttaacttctctggtcacgaagccccacactgggtcaaccacttccaaactgttgctccattgtacgaaccacaccaaagaaagaacatcttttactctaactgtggtattgttgctatgggctctattttgacctatttgtccatggttttctctccattaactgttttcatgtactacggtatcccatacttgggtgttaatgcttggattgtttgcattacttacttacaacacactgatccaaaggttcctcacttcagagacaacgaatggaattttcaaagaggtgccgcttgtaccatcgatagatccttcggtactattgtcaaccacttgcaccaccacatcggcgattcccaccaatgtcaccacatgttctctcaaatgccattctacaatgctgtcgaagctactaagtatctaaaggccaagctaggtaagtactacatcttcgacgacactccaattgccaaggctttgtacagaaactggagagaatgtaaattcgtcgaagacgaaggtgatgttgttttctacaagcactaa

SEQ ID NO: 891 - DNA, 1212 bp, Artificial sequence
  Delta-15 Desaturase
atggcccctccacacgtcgtcgacgaacaagttagaagaagaatcgttgttgaagacgagattaagtcaaagaaacaattcgagagaaactacgtcccaatggatttcactatcaaggaaatcagagacgctatccctgctcacttattcatcagagacacaactaagtcaattctacacgttgtcaaagatttggttaccattgccattgttttctactgtgctaccttcatcgaaactttgccatccttggctttgagagttccagcatggatcacctactggattattcaaggtaccgtcatggttggtccatggattttggctcacgaatgtggtcacggtgccttttctcatcacaagtggttcaacaccattttgggttgggtcttgcattccgctttgttggttccttatcaggcatgggcaatgtcacactctaagcaccacaagtttactggtactatggcgaaggatgtcgtcttcattccagctactcgttcctacaaaggtctacctgccctagaaaagcctgctgttgaagaagaagtttctgaacaagaacatcaccaccatgaagaatccatctttgctgaaaccccaatctacactttgggtgccttgttgttcgttttaaccttcggttggccattgtacctaattgttaacttctctggtcacgaagccccacactgggtcaaccacttccaaactacctcttcattttacaaagctcgtcaaagaaagaacatcttttactctaactgtggtattgttgctatgggctctattttgacctatttgtccatggttttctctccattaactgttttcatgtactacggtatcccatacttgggtgttaatgcttggattgtttgcattacttacttacaacacactgatccaaaggttcctcacttcagagacaacgaatggaattttcaaagaggtgccgcttgtaccatcgatagatccttcggtactattgtcaaccacttgcaccaccacatcggcgattcccaccaatgtcaccacatgttctctcaaatgccattctacaatgctgtcgaagctactaagtatctaaaggccaagctaggtaagtactacatcttcgacgacactccaattgccaaggctttgtacagaaactggagagaatgtaaattcgtcgaagacgaaggtgatgttgttttctacaagcactaa

SEQ ID NO: 892 - DNA, 1212 bp, Artificial sequence
  Delta-15 Desaturase
atggcccctccacacgtcgtcgacgaacaagttagaagaagaatcgttgttgaagacgagattaagtcaaagaaacaattcgagagaaactacgtcccaatggatttcactatcaaggaaatcagagacgctatccctgctcacttattcatcagagacacaactaagtcaattctacacgttgtcaaagatttggttaccattgccattgttttctactgtgctaccttcatcgaaactttgccatccttggctttgagagttccagcatggatcacctactggattattcaaggtaccgtcatggttggtccatggattttggctcacgaatgtggtcacggtgccttttctaaatacaggtcgatcaactacattatgggttgggtcttgcattccgctttgttggttccttatcaggcatgggcaatgtcacactctaagcaccacaaggctactggtaatatggcgaaggatatggtcttcattccagctactcgttcctacaaaggtctacctgccctagaaaagcctgctgttgaagaagaagtttctgaacaagaacatcaccaccatgaagaatccatctttgctgaaaccccaatctacactttgggtgccttgttgttcgttttaaccttcggttggccattgtacctaattgttaacttctctggtcacgaagccccacactgggtcaaccacttccaacctacctctgcagttttcaaagctaggcaaagaaagaacatcttttactctaactgtggtattgttgctatgggctctattttgacctatttgtccatggttttctctccattaactgttttcatgtactacggtatcccatacttgggtgttaatgcttggattgtttgcattacttacttacaacacactgatccaaaggttcctcacttcagagacaacgaatggaattttcaaagaggtgccgcttgtaccatcgatagatccttcggtactattgtcaaccacttgcaccaccacatcggcgattcccaccaatgtcaccacatgttctctcaaatgccattctacaatgctgtcgaagctactaagtatctaaaggccaagctaggtaagtactacatcttcgacgacactccaattgccaaggctttgtacagaaactggagagaatgtaaattcgtcgaagacgaaggtgatgttgttttctacaagcactaa

SEQ ID NO: 893 - DNA, 1212 bp, Artificial sequence
  Delta-15 Desaturase
atggcccctccacacgtcgtcgacgaacaagttagaagaagaatcgttgttgaagacgagattaagtcaaagaaacaattcgagagaaactacgtcccaatggatttcactatcaaggaaatcagagacgctatccctgctcacttattcatcagagacacaactaagtcaattctacacgttgtcaaagatttggttaccattgccattgttttctactgtgctaccttcatcgaaactttgccatccttggctttgagagttccagcatggatcacctactggattattcaaggtaccgtcatggttggtccatggattttggctcacgaatgtggtcacggtgccttttctaaatacaggtcgatcaactacattatgggttgggtcttgcattccgctttgttggttccttatcaggcatgggcaatgtcacactctaagcaccacaaggctactggtaatatggcgaaggatatggtcttcattccagctactcgttcctacaaaggtctacctgccctagaaaagcctgctgttgaagaagaagtttctgaacaagaacatcaccaccatgaagaatccatctttgctgaaaccccaatctacactttgggtgccttgttgttcgttttaaccttcggttggccattgtacctaattgttaacttctctggtcacgaagccccacactgggtcaaccacttccaagctatcgcttcattttacacagaaaggcaaagaaagaacatcttttactctaactgtggtattgttgctatgggctctattttgacctatttgtccatggttttctctccattaactgttttcatgtactacggtatcccatacttgggtgttaatgcttggattgtttgcattacttacttacaacacactgatccaaaggttcctcacttcagagacaacgaatggaattttcaaagaggtgccgcttgtaccatcgatagatccttcggtactattgtcaaccacttgcaccaccacatcggcgattcccaccaatgtcaccacatgttctctcaaatgccattctacaatgctgtcgaagctactaagtatctaaaggccaagctaggtaagtactacatcttcgacgacactccaattgccaaggctttgtacagaaactggagagaatgtaaattcgtcgaagacgaaggtgatgttgttttctacaagcactaa

SEQ ID NO: 894 - DNA, 1212 bp, Artificial sequence
  Delta-15 Desaturase
atggcccctccacacgtcgtcgacgaacaagttagaagaagaatcgttgttgaagacgagattaagtcaaagaaacaattcgagagaaactacgtcccaatggatttcactatcaaggaaatcagagacgctatccctgctcacttattcatcagagacacaactaagtcaattctacacgttgtcaaagatttggttaccattgccattgttttctactgtgctaccttcatcgaaactttgccatccttggctttgagagttccagcatggatcacctactggattattcaaggtaccgtcatggttggtccatggattttggctcacgaatgtggtcacggtgccttttctaaatacaggtcgatcaactacattatgggttgggtcttgcattccgctttgttggttccttatcaggcatgggcaatgtcacactctaagcaccacaaggctactggtaatatggcgaaggatatggtcttcattccagctactcgttcctacaaaggtctacctgccctagaaaagcctgctgttgaagaagaagtttctgaacaagaacatcaccaccatgaagaatccatctttgctgaaaccccaatctacactttgggtgccttgttgttcgttttaaccttcggttggccattgtacctaattgttaacttctctggtcacgaagccccacactgggtcaaccacttccaagctgtctctccagtttacggaactcagcaaagaaagaacatcttttactctaactgtggtattgttgctatgggctctattttgacctatttgtccatggttttctctccattaactgttttcatgtactacggtatcccatacttgggtgttaatgcttggattgtttgcattacttacttacaacacactgatccaaaggttcctcacttcagagacaacgaatggaattttcaaagaggtgccgcttgtaccatcgatagatccttcggtactattgtcaaccacttgcaccaccacatcggcgattcccaccaatgtcaccacatgttctctcaaatgccattctacaatgctgtcgaagctactaagtatctaaaggccaagctaggtaagtactacatcttcgacgacactccaattgccaaggctttgtacagaaactggagagaatgtaaattcgtcgaagacgaaggtgatgttgttttctacaagcactaa

SEQ ID NO: 895 - DNA, 1212 bp, Artificial sequence
  Delta-15 Desaturase
atggcccctccacacgtcgtcgacgaacaagttagaagaagaatcgttgttgaagacgagattaagtcaaagaaacaattcgagagaaactacgtcccaatggatttcactatcaaggaaatcagagacgctatccctgctcacttattcatcagagacacaactaagtcaattctacacgttgtcaaagatttggttaccattgccattgttttctactgtgctaccttcatcgaaactttgccatccttggctttgagagttccagcatggatcacctactggattattcaaggtaccgtcatggttggtccatggattttggctcacgaatgtggtcacggtgccttttctaaatacaggtcgatcaactacattatgggttgggtcttgcattccgctttgttggttccttatcaggcatgggcaatgtcacactctaagcaccacaaggctactggtaatatggcgaaggatatggtcttcattccagctactcgttcctacaaaggtctacctgccctagaaaagcctgctgttgaagaagaagtttctgaacaagaacatcaccaccatgaagaatccatctttgctgaaaccccaatctacactttgggtgccttgttgttcgttttaaccttcggttggccattgtacctaattgttaacttctctggtcacgaagccccacactgggtcaaccacttccaatctatcactccactttacaaaaatcggcagagaaagaacatcttttactctaactgtggtattgttgctatgggctctattttgacctatttgtccatggttttctctccattaactgttttcatgtactacggtatcccatacttgggtgttaatgcttggattgtttgcattacttacttacaacacactgatccaaaggttcctcacttcagagacaacgaatggaattttcaaagaggtgccgcttgtaccatcgatagatccttcggtactattgtcaaccacttgcaccaccacatcggcgattcccaccaatgtcaccacatgttctctcaaatgccattctacaatgctgtcgaagctactaagtatctaaaggccaagctaggtaagtactacatcttcgacgacactccaattgccaaggctttgtacagaaactggagagaatgtaaattcgtcgaagacgaaggtgatgttgttttctacaagcactaa

SEQ ID NO: 896 - DNA, 1212 bp, Artificial sequence
  Delta-15 Desaturase
atggcccctccacacgtcgtcgacgaacaagttagaagaagaatcgttgttgaagacgagattaagtcaaagaaacaattcgagagaaactacgtcccaatggatttcactatcaaggaaatcagagacgctatccctgctcacttattcatcagagacacaactaagtcaattctacacgttgtcaaagatttggttaccattgccattgttttctactgtgctaccttcatcgaaactttgccatccttggctttgagagttccagcatggatcacctactggattattcaaggtaccgtcatggttggtccatggattttggctcacgaatgtggtcacggtgccttttctaaatacaggtcgatcaactacattatgggttgggtcttgcattccgctttgttggttccttatcaggcatgggcaatgtcacactctaagcaccacaaggctactggtaatatggcgaaggatatggtcttcattccagctactcgttcctacaaaggtctacctgccctagaaaagcctgctgttgaagaagaagtttctgaacaagaacatcaccaccatgaagaatccatctttgctgaaaccccaatctacactttgggtgccttgttgttcgttttaaccttcggttggccattgtacctaattgttaacttctctggtcacgaagccccacactgggtcaaccacttccaacctatctctacatttttcgcaacaaggcaaagaaagaacatcttttactctaactgtggtattgttgctatgggctctattttgacctatttgtccatggttttctctccattaactgttttcatgtactacggtatcccatacttgggtgttaatgcttggattgtttgcattacttacttacaacacactgatccaaaggttcctcacttcagagacaacgaatggaattttcaaagaggtgccgcttgtaccatcgatagatccttcggtactattgtcaaccacttgcaccaccacatcggcgattcccaccaatgtcaccacatgttctctcaaatgccattctacaatgctgtcgaagctactaagtatctaaaggccaagctaggtaagtactacatcttcgacgacactccaattgccaaggctttgtacagaaactggagagaatgtaaattcgtcgaagacgaaggtgatgttgttttctacaagcactaa

SEQ ID NO: 897 - DNA, 1212 bp, Artificial sequence
  Delta-15 Desaturase
atggcccctccacacgtcgtcgacgaacaagttagaagaagaatcgttgttgaagacgagattaagtcaaagaaacaattcgagagaaactacgtcccaatggatttcactatcaaggaaatcagagacgctatccctgctcacttattcatcagagacacaactaagtcaattctacacgttgtcaaagatttggttaccattgccattgttttctactgtgctaccttcatcgaaactttgccatccttggctttgagagttccagcatggatcacctactggattattcaaggtaccgtcatggttggtccatggattttggctcacgaatgtggtcacggtgccttttctaaatacaagtggttcaactccattatcggttgggtcttgcattccgctttgttggttccttatcaggcatgggcaatgtcacactctaagcaccacaagtttactggtactatgactaaggatgttgtcttcattccagctactcgttcctacaaaggtctacctgccctagaaaagcctgctgttgaagaagaagtttctgaacaagaacatcaccaccatgaagaatccatctttgctgaaaccccaatctacactttgggtgccttgttgttcgttttaaccttcggttggccattgtacctaattgttaacttctctggtcacgaagccccacactgggtcaaccacttccaagctaccgctacacttttcagacaaaagcaaagaaagaacatcttttactctaactgtggtattgttgctatgggctctattttgacctatttgtccatggttttctctccattaactgttttcatgtactacggtatcccatacttgggtgttaatgcttggattgtttgcattacttacttacaacacactgatccaaaggttcctcacttcagagacaacgaatggaattttcaaagaggtgccgcttgtaccatcgatagatccttcggtactattgtcaaccacttgcaccaccacatcggcgattcccaccaatgtcaccacatgttctctcaaatgccattctacaatgctgtcgaagctactaagtatctaaaggccaagctaggtaagtactacatcttcgacgacactccaattgccaaggctttgtacagaaactggagagaatgtaaattcgtcgaagacgaaggtgatgttgttttctacaagcactaa

SEQ ID NO: 898 - DNA, 1212 bp, Artificial sequence
  Delta-15 Desaturase
atggcccctccacacgtcgtcgacgaacaagttagaagaagaatcgttgttgaagacgagattaagtcaaagaaacaattcgagagaaactacgtcccaatggatttcactatcaaggaaatcagagacgctatccctgctcacttattcatcagagacacaactaagtcaattctacacgttgtcaaagatttggttaccattgccattgttttctactgtgctaccttcatcgaaactttgccatccttggctttgagagttccagcatggatcacctactggattattcaaggtaccgtcatggttggtccatggattttggctcacgaatgtggtcacggtgccttttctaaatacaagtggttcaactccattatcggttgggtcttgcattccgctttgttggttccttatcaggcatgggcaatgtcacactctaagcaccacaagtttactggtactatgactaaggatgttgtcttcattccagctactcgttcctacaaaggtctacctgccctagaaaagcctgctgttgaagaagaagtttctgaacaagaacatcaccaccatgaagaatccatctttgctgaaaccccaatctacactttgggtgccttgttgttcgttttaaccttcggttggccattgtacctaattgttaacttctctggtcacgaagccccacactgggtcaaccacttccaatctatcgctacactttacaaaaaaaatcaaagaaagaacatcttttactctaactgtggtattgttgctatgggctctattttgacctatttgtccatggttttctctccattaactgttttcatgtactacggtatcccatacttgggtgttaatgcttggattgtttgcattacttacttacaacacactgatccaaaggttcctcacttcagagacaacgaatggaattttcaaagaggtgccgcttgtaccatcgatagatccttcggtactattgtcaaccacttgcaccaccacatcggcgattcccaccaatgtcaccacatgttctctcaaatgccattctacaatgctgtcgaagctactaagtatctaaaggccaagctaggtaagtactacatcttcgacgacactccaattgccaaggctttgtacagaaactggagagaatgtaaattcgtcgaagacgaaggtgatgttgttttctacaagcactaa

SEQ ID NO: 899 - DNA, 1212 bp, Artificial sequence
  Delta-15 Desaturase
atggcccctccacacgtcgtcgacgaacaagttagaagaagaatcgttgttgaagacgagattaagtcaaagaaacaattcgagagaaactacgtcccaatggatttcactatcaaggaaatcagagacgctatccctgctcacttattcatcagagacacaactaagtcaattctacacgttgtcaaagatttggttaccattgccattgttttctactgtgctaccttcatcgaaactttgccatccttggctttgagagttccagcatggatcacctactggattattcaaggtaccgtcatggttggtccatggattttggctcacgaatgtggtcacggtgccttttctaaacacaggaggatcaacaccattatcggttgggtcttgcattccgctttgttggttccttatcaggcattggcaatgtcacactctaagcaccacaagggtactggttccatggagaaggatttggtcttcattccagctactcgttcctacaaaggtctacctgccctagaaaagcctgctgttgaagaagaagtttctgaacaagaacatcaccaccatgaagaatccatctttgctgaaaccccaatctacactttgggtgccttgttgttcgttttaaccttcggttggccattgtacctaattgttaacttctctggtcacgaagccccacactgggtcaaccacttccaacctatcgctacaattttcgaacctaggcaaagaaagaacatcttttactctaactgtggtattgttgctatgggctctattttgacctatttgtccatggttttctctccattaactgttttcatgtactacggtatcccatacttgggtgttaatgcttggattgtttgcattacttacttacaacacactgatccaaaggttcctcacttcagagacaacgaatggaattttcaaagaggtgccgcttgtaccatcgatagatccttcggtactattgtcaaccacttgcaccaccacatcggcgattcccaccaatgtcaccacatgttctctcaaatgccattctacaatgctgtcgaagctactaagtatctaaaggccaagctaggtaagtactacatcttcgacgacactccaattgccaaggctttgtacagaaactggagagaatgtaaattcgtcgaagacgaaggtgatgttgttttctacaagcactaa

SEQ ID NO: 900 - DNA, 1212 bp, Artificial sequence
  Delta-15 Desaturase
atggcccctccacacgtcgtcgacgaacaagttagaagaagaatcgttgttgaagacgagattaagtcaaagaaacaattcgagagaaactacgtcccaatggatttcactatcaaggaaatcagagacgctatccctgctcacttattcatcagagacacaactaagtcaattctacacgttgtcaaagatttggttaccattgccattgttttctactgtgctaccttcatcgaaactttgccatccttggctttgagagttccagcatggatcacctactggattattcaaggtaccgtcatggttggtccatggattttggctcacgaatgtggtcacggtgccttttctcatcacaagtggttcaacaccattttgggttgggtcttgcattccgctttgttggttccttatcaggcatgggcaatgtcacactctaagcaccacaagtttactggtactatggcgaaggatgtcgtcttcattccagctactcgttcctacaaaggtctacctgccctagaaaagcctgctgttgaagaagaagtttctgaacaagaacatcaccaccatgaagaatccatctttgctgaaaccccaatctacactttgggtgccttgttgttcgttttaaccttcggttggccattgtacctaattgttaacttctctggtcacgaagccccacactgggtcaaccacttccaagctgtctctacactttacgaaactaggcaaagaaagaacatcttttactctaactgtggtattgttgctatgggctctattttgacctatttgtccatggttttctctccattaactgttttcatgtactacggtatcccatacttgggtgttaatgcttggattgtttgcattacttacttacaacacactgatccaaaggttcctcacttcagagacaacgaatggaattttcaaagaggtgccgcttgtaccatcgatagatccttcggtactattgtcaaccacttgcaccaccacatcggcgattcccaccaatgtcaccacatgttctctcaaatgccattctacaatgctgtcgaagctactaagtatctaaaggccaagctaggtaagtactacatcttcgacgacactccaattgccaaggctttgtacagaaactggagagaatgtaaattcgtcgaagacgaaggtgatgttgttttctacaagcactaa

SEQ ID NO: 901 - DNA, 1212 bp, Artificial sequence
  Delta-15 Desaturase
atggcccctccacacgtcgtcgacgaacaagttagaagaagaatcgttgttgaagacgagattaagtcaaagaaacaattcgagagaaactacgtcccaatggatttcactatcaaggaaatcagagacgctatccctgctcacttattcatcagagacacaactaagtcaattctacacgttgtcaaagatttggttaccattgccattgttttctactgtgctaccttcatcgaaactttgccatccttggctttgagagttccagcatggatcacctactggattattcaaggtaccgtcatggttggtccatggattttggctcacgaatgtggtcacggtgccttttctgattccaagactatcaacactattttcggttgggtcttgcattccgctttgttggttccttatcaggcatgggcaatgtcacactctaagcaccacaagggtactggttccatgactaaggatgttgtcttcattccagctactcgttcctacaaaggtctacctgccctagaaaagcctgctgttgaagaagaagtttctgaacaagaacatcaccaccatgaagaatccatctttgctgaaaccccaatctacactttgatcgcgttcatcgcccacctgaccttcggttggccattgtacctaattgttaacttctctggtcacgaagccccacactgggtcaaccacttccaaactgttgctccattgtacgaaccacaccaaagaaagaacatcttttactctaactgtggtattgttgctatgggctctattttgacctatttgtccatggttttctctccattaactgttttcatgtactacggtatcccatacttgggtgttaatgcttggattgtttgcattacttacttacaacacactgatccaaaggttcctcacttcagagacaacgaatggaattttcaaagaggtgccgcttgtaccatcgatagatccttcggtactattgtcaaccacttgcaccaccacatcggcgattcccaccaatgtcaccacatgttctctcaaatgccattctacaatgctgtcgaagctactaagtatctaaaggccaagctaggtaagtactacatcttcgacgacactccaattgccaaggctttgtacagaaactggagagaatgtaaattcgtcgaagacgaaggtgatgttgttttctacaagcactaa

SEQ ID NO: 902 - DNA, 1212 bp, Artificial sequence
  Delta-15 Desaturase
atggcccctccacacgtcgtcgacgaacaagttagaagaagaatcgttgttgaagacgagattaagtcaaagaaacaattcgagagaaactacgtcccaatggatttcactatcaaggaaatcagagacgctatccctgctcacttattcatcagagacacaactaagtcaattctacacgttgtcaaagatttggttaccattgccattgttttctactgtgctaccttcatcgaaactttgccatccttggctttgagagttccagcatggatcacctactggattattcaaggtaccgtcatggttggtccatggattttggctcacgaatgtggtcacggtgccttttctgattccaagactatcaacactattttcggttgggtcttgcattccgctttgttggttccttatcaggcatgggcaatgtcacactctaagcaccacaagggtactggttccatgactaaggatgttgtcttcattccagctactcgttcctacaaaggtctacctgccctagaaaagcctgctgttgaagaagaagtttctgaacaagaacatcaccaccatgaagaatccatctttgctgaaaccccaatctacattttggtctcgttcgtcttcctccagaccttcggttggccattgtacctaattgttaacttctctggtcacgaagccccacactgggtcaaccacttccaaactgttgctccattgtacgaaccacaccaaagaaagaacatcttttactctaactgtggtattgttgctatgggctctattttgacctatttgtccatggttttctctccattaactgttttcatgtactacggtatcccatacttgggtgttaatgcttggattgtttgcattacttacttacaacacactgatccaaaggttcctcacttcagagacaacgaatggaattttcaaagaggtgccgcttgtaccatcgatagatccttcggtactattgtcaaccacttgcaccaccacatcggcgattcccaccaatgtcaccacatgttctctcaaatgccattctacaatgctgtcgaagctactaagtatctaaaggccaagctaggtaagtactacatcttcgacgacactccaattgccaaggctttgtacagaaactggagagaatgtaaattcgtcgaagacgaaggtgatgttgttttctacaagcactaa
